(19) United States
(12) Patent Application Publication
(10) Pub. No.: US 2024/0409912 A1
(43) Pub. Date: Dec. 12, 2024

(54) ENGINEERED PROTEASE POLYPEPTIDES

(71) Applicants: Codexis, Inc., Redwood City, CA (US); Société des Produits Nestlé S.A., Vevey (CH)

(72) Inventors: Chinping Chng, Menlo Park, CA (US); Ruth L. Cong, Palo Alto, CA (US); Da Duan, Foster City, CA (US); Brian Ferrer, San Mateo, CA (US); Ravi David Garcia, Los Gatos, CA (US); Nikki D. Kruse, San Carlos, CA (US); Hirdesh Kumar, Redwood City, CA (US); Stephen Joshua Macaso Millet, Tracy, CA (US); Trica Windgassen, Newbury Park, CA (US); Liang Zhu, San Mateo, CA (US)

(21) Appl. No.: 18/679,281

(22) Filed: May 30, 2024

Related U.S. Application Data
(60) Provisional application No. 63/505,055, filed on May 30, 2023.

(51) Int. Cl. C12N 9/54; C12N 9/96

(52) U.S. Cl. CPC C12N 9/54; C12N 9/96; C12Y 304/21

(57) ABSTRACT

The present disclosure provides engineered protease polypeptides, recombinant polynucleotides encoding the engineered protease polypeptides, and uses of the engineered protease polypeptides in therapeutic applications.

### CROSS-REFERENCE TO RELATED APPLICATIONS

[0001] This application claims the benefit of U.S. Provisional Application 63/505,055, filed May 30, 2023, which is incorporated by reference herein.

### REFERENCE TO SEQUENCE LISTING, TABLE OR COMPUTER PROGRAM

[0002] The Sequence Listing concurrently submitted herewith as file name CX7-253US2_ST26.xml, created on May 30, 2024, with a file size of 4,736,576 bytes, is hereby incorporated by reference herein in its entirety.

### TECHNICAL FIELD

[0003] The present disclosure relates to engineered protease polypeptides, compositions thereof, polynucleotides encoding the engineered protease polypeptides, and uses of the engineered polypeptides and recombinant polynucleotides in therapeutic and other applications.

### BACKGROUND

[0004] Pancreatic exocrine insufficiency (PEI) or exocrine pancreatic insufficiency (EPI) is a condition in which the pancreas does not supply a sufficient amount of digestive enzymes needed to digest food efficiently. Following passage of food through the stomach, ingested food is converted into acidic chyme that flows in the duodenum of the small intestine, which receives, among others, pancreatic enzymes (e.g., lipase, amylase, and protease) that break down the food for absorption in the small intestine. Poor digestion of food in PEI/EPI can lead to malabsorption of fats, proteins, carbohydrates, and vitamins by the intestines, which can lead to malnutrition, changes in bone density, and increased risk of mortality. The reduction in pancreatic enzymes may arise from inadequate pancreatic stimulation of pancreatic secretion, insufficient secretion of pancreatic digestive enzymes by the pancreatic acinar cells, or outflow obstruction of the pancreatic duct, and inadequate mixing of the pancreatic enzymes with food.

[0005] PEI/EPI is often associated with pancreatitis, cystic fibrosis, celiac disease, inflammatory bowel disease (IBD), Crohn's disease, ulcerative colitis, and pancreatic cancer, all of which can lead to decreased secretion of pancreatic enzymes into the duodenum. An approved treatment for PEI/EPI is pancreatic replacement therapy (PERT), which is an orally administered cocktail of digestive enzymes amylase, lipase, and protease, mostly derived from porcine origin (e.g., Creon™, Zenpep™, Pertzye™, and Pancreaz™). However, PERT treatment may not alleviate the condition in some people due to insufficient activity of the PERT enzymes in the gastrointestinal tract and/or insufficient patient compliance with the therapy due to the significant pill burden associated with current treatment protocols. In some cases, the coefficient of fat absorption (CFA) and/or coefficient of nitrogen absorption (CNA) is inferior to that of healthy patients, resulting in weight loss and other health concerns. Thus, a need remains in the art for improved PERT treatments.

### SUMMARY

[0006] The present disclosure provides engineered protease polypeptides, recombinant polynucleotides encoding the engineered protease polypeptides, and uses of the engineered protease polypeptides for degrading target proteins and polypeptides. As provided in detail herein, in some embodiments, the protease polypeptides have been engineered to exhibit an improved property compared to the naturally occurring protease, including among others, enhanced expression, increased proteolytic activity of the active protease, increased thermostability, increased resistance against gastric proteases, increased activity at acidic pH, and increased stability at acidic pH.

[0007] In some embodiments, the present disclosure provides an engineered protease polypeptide, or a biologically active fragment thereof, comprising an amino acid sequence having at least 70%, 75%, 80%, 81%, 82%, 83%, 84%, 85%, 86%, 87%, 88%, 89%, 90%, 91%, 92%, 93%, 94%, 95%, 96%, 97%, 98%, or 99%, or more sequence identity to a reference sequence corresponding to residues 135-413 of SEQ ID NO: 4, 628, 948, 1126, 1368, or 1548, or to a reference sequence corresponding to SEQ ID NO: 4, 628, 948, 1126, 1368, or 1548, wherein the amino acid sequence comprises one or more substitutions relative to the reference sequence corresponding to residues 135-413 of SEQ ID NO: 4, 628, 948, 1126, 1368, or 1548, or relative to the reference sequence corresponding to SEQ ID NO: 4, 628, 948, 1126, 1368, or 1548.

[0008] In some embodiments, the engineered protease polypeptide comprises an amino acid sequence having at least 70%, 75%, 80%, 81%, 82%, 83%, 84%, 85%, 86%, 87%, 88%, 89%, 90%, 91%, 92%, 93%, 94%, 95%, 96%, 97%, 98%, or 99%, or more sequence identity to the reference sequence corresponding to residues 135-413 of SEQ ID NO: 4 or 628, or to the reference sequence corresponding to SEQ ID NO: 4 or 628, wherein the amino acid sequence comprises one or more substitutions relative to the reference sequence corresponding to residues 135-413 of SEQ ID NO: 4, or 628, or relative to the reference sequence corresponding to SEQ ID NO: 4 or 628.

[0009] In some embodiments, the engineered protease polypeptide comprises an amino acid sequence having at least 70%, 75%, 80%, 81%, 82%, 83%, 84%, 85%, 86%, 87%, 88%, 89%, 90%, 91%, 92%, 93%, 94%, 95%, 96%, 97%, 98%, or 99%, or more sequence identity to the reference sequence corresponding to residues 135-413 of SEQ ID NO: 948, 1126, 1368, or 1548, or to the reference sequence corresponding to SEQ ID NO: 948, 1126, 1368, or 1548, wherein the amino acid sequence comprises one or more substitutions relative to the reference sequence corresponding to residues 135-413 of SEQ ID NO: 4 or 628, or relative to the reference sequence corresponding to SEQ ID NO: 4 or 628.

[0010] In some embodiments, the engineered protease polypeptide comprises an amino acid sequence having at least 70%, 75%, 80%, 81%, 82%, 83%, 84%, 85%, 86%, 87%, 88%, 89%, 90%, 91%, 92%, 93%, 94%, 95%, 96%, 97%, 98%, or 99%, or more sequence identity to a reference sequence corresponding to residues 135-413 of an even-numbered SEQ ID NO. of SEQ ID NOs: 6-2242, or to a reference sequence corresponding to an even-numbered SEQ ID NO. of SEQ ID NOs: 6-2242, wherein the amino acid sequence comprises one or more substitutions relative to the reference sequence corresponding to residues 135-413 of SEQ ID NO: 4 or 628, or relative to the reference sequence corresponding to SEQ ID NO: 4 or 628.

[0011] In some embodiments, the amino acid sequence of the engineered protease polypeptide comprises at least a substitution at amino acid position 11, 31, 42, 45, 50, 53, 84, 99, 100, 126, 128, 129, 130, 131, 132, 134, 135, 136, 137, 138, 139, 140, 141, 143, 145, 151, 154, 156, 157, 159, 160, 161, 162, 163, 169, 172, 173, 174, 179, 180, 184, 185, 186, 187, 188, 190, 191, 192, 193, 194, 198, 199, 212, 214, 220, 221, 222, 223, 225, 231, 232, 233, 235, 237, 238, 239, 240, 242, 243, 245, 246, 249, 250, 251, 252, 253, 254, 256, 258, 262, 263, 264, 265, 266, 267, 268, 269, 271, 273, 274, 275, 277, 278, 279, 280, 281, 283, 285, 290, 292, 293, 294, 296, 297, 300, 302, 303, 311, 312, 313, 314, 315, 316, 318, 324, 328, 336, 339, 341, 342, 343, 345, 346, 355, 358, 360, 364, 367, 368, 369, 370, 371, 372, 373, 374, 375, 377, 381, 382, 384, 386, 389, 391, 392, 401, 402, 405, 406, 409, 410, 411, 412, or 413, or combinations thereof, wherein the amino acid positions are relative to the reference sequence corresponding to residues 135-413 of SEQ ID NO: 4 or 628, or relative to the reference sequence corresponding to SEQ ID NO: 4 or 628.

[0012] In some embodiments, the amino acid sequence of the engineered protease polypeptide comprises at least a substitution or amino acid residue 11K, 31G, 42W, 45Y, 50R, 53A, 84M, 99V, 100V, 126T, 128G/I/K/L/P/R/S/T/V, 129E/F/H/I/K/L/R/S/T/V, 130A/F/G/N/V, 131E/P/R/T/V/Y, 132A/C/D/E/G/P/R/V/Y, 134A/C/D/E/G/I/L/M/N/P/S/T/V/W/Y, 135C/E/G/H/I/K/L/M/N/P/R/S/T/V/W/Y, 136C/G/I/M, 137A/D/N/S, 138Q, 139C/D/E/F/H/I/K/L/M/R/S, 140L, 141A/C/D/E/F/G/H/I/L/M/Q/R/S/T/V/W/Y, 143A/C/D/N/Q/S/T, 145A/C/D/E/F/G/H/I/K/L/P/Q/R/S/T/V/W, 151D/Q, 154C/D/L/R, 156C/V, 157A/C/D/E/F/G/H/I/K/L/M/N/P/Q/R/T/V/W, 159G, 160A/C/D/E/F/K/L/M/N/P/R/Q/T/V/W/Y, 161D/E/G/L/R, 162I, 163H/L, 169S, 172Q, 173F/S, 174L, 179K/S, 180H/L/M, 184A/D/G/L/M/Q/R, 185A/D/E/F/G/L/M/P/Q/R/S/T/V, 186A/R/S/T/Y, 187A, 188A/C/D/F/G/L/M/S/T/W, 190S, 191R, 192C/D/M/N, 193T, 194A/D/L/T, 198G, 199C/K/L, 212S, 214A/C/D/E/F/G/H/I/K/L/M/N/P/Q/R/T/V/W/Y, 220K/L/R, 221A/C/D/E/F/G/H/I/K/L/M/P/Q/R/T/V/W/Y, 222G, 223S, 225V, 231H/V, 232S, 233G/I/L, 235Q/R/V, 237A/G, 238Q, 239L/M, 240A/L, 242E/S, 243E/L/M/R/S/T, 245L/V, 246I/V, 249G/M/S, 250A/C/F/L/N/T, 251D/S, 252P, 253C/I/V, 254C/E, 256L/M, 258W, 262A/S, 263E/H/P/Q/R/S, 264A/C/F/I/L/N/P/R/T/V, 265C/G/R, 266H/T/Y, 267A/G/H/I/L/M/R/S/T/V/W, 268A/F/G/H/I/N/P/Q/T/V/Y, 269Q/T, 271A, 273A/C/F/L/M/S/T, 274A/G/K/L/T/V/W, 275A/V, 277D/G, 278L/N/S/V/Y, 279A/E/F/G/H/K/L/M/R/S/T/Y/V/W, 280D/K/S/T, 281C/V, 283M, 285S, 290E/G/S, 292V, 293A, 294V/W, 296M/R, 297F, 300R/V, 302G/P, 303A/V, 311A/E/D/G/K/M/Q/S, 312A/C/D/E/G/H/I/K/L/M/N/P/Q/R/T/V/W/Y, 313A/Q/S/T, 314G, 315A/C/D/E/F/G/H/I/K/L/M/Q/R/S/V/W/Y, 316K, 318N/P/R, 324A/D/E/I/R/V/W/Y, 328L/M, 336F, 339S/W, 341G, 342A/C/D/E/F/G/I/K/M/N/P/R/Q/T/V/W/Y, 343S, 345A/C/D/E/F/G/I/K/L/M/Q/R/S/V/W/Y, 346A/C/D/F/G/K/L/M/N/P/Q/R/T/V/W/Y, 355A, 358S, 360S, 364A/V, 367V, 368G/T, 369I/V/W, 370C/E/F/G/I/K/L/P/Q/R/S/V, 371L, 372A/C/F/L/R/V/Y, 373A/C/E/F/M/S/Y, 374E/G/L/R/S/W/Y, 375A/E/I/L/M/S/T/V, 377H, 381N, 382G/R/S/T, 384C, 386P/W, 389C/P, 391L/S, 392Y, 401L, 402G/*, 405L/Q, 406C/M/R/W, 409E/R/*, 410C/I/W/*, 411L/R/T/V, 412P/T/*, or 413A/C/D/S/*, or combinations thereof, wherein the amino acid positions are relative to the reference sequence corresponding to residues 135-413 of SEQ ID NO: 4 or 628, or relative to the reference sequence corresponding to SEQ ID NO: 4 or 628.

[0013] In some embodiments, the amino acid sequence of the engineered protease polypeptide comprises at least a substitution at amino acid position 135, 137, 139, 141, 143, 157, 160, 214, 268, 273, 279, 311, 312, 315, 328, 342, 345, 346, or 372, or combinations thereof, wherein the amino acid positions are relative to the reference sequence corresponding to residues 135-413 of SEQ ID NO: 4 or 628, or relative to the reference sequence corresponding to SEQ ID NO: 4 or 628.

[0014] In some embodiments, the amino acid sequence of the engineered protease polypeptide comprises at least a substitution or amino acid residue 135C/E/G/H/I/K/L/M/N/P/R/S/T/V/W/Y, 137A/D/N/S, 139C/D/E/F/H/I/K/L/M/R/S, 141A/C/D/E/F/G/H/I/L/M/Q/R/S/T/V/W/Y, 143A/C/D/N/Q/S/T, 157A/C/D/E/F/G/H/I/K/L/M/N/P/Q/R/T/V/W, 160A/C/D/E/F/K/L/M/N/P/R/Q/T/V/W/Y, 214A/C/D/E/F/G/H/I/K/L/M/N/P/Q/R/T/V/W/Y, 268A/F/G/H/I/N/P/Q/T/V/Y, 273A/C/F/L/M/S/T, 279A/E/F/G/H/K/L/M/R/S/T/Y/V/W, 311A/E/D/G/K/M/Q/S, 312A/C/D/E/G/H/I/K/L/M/N/P/Q/R/T/V/W/Y, 315A/C/D/E/F/G/H/I/K/L/M/Q/R/S/V/W/Y, 328L/M, 342A/C/D/E/F/G/I/K/M/N/P/R/Q/T/V/W/Y, 345A/C/D/E/F/G/I/K/L/M/Q/R/S/V/W/Y, 346A/C/D/F/G/K/L/M/N/P/Q/R/T/V/W/Y, or 372A/C/F/L/R/V/Y, or combinations thereof, wherein the amino acid positions are relative to the reference sequence corresponding to residues 135-413 of SEQ ID NO: 4 or 628, or relative to the reference sequence corresponding to SEQ ID NO: 4 or 628.

[0015] In some embodiments, the amino acid sequence of the engineered protease polypeptide comprises at least a substitution set at amino acid positions 135/141/160/311/315/372, 143/328/342/345, 139/157/268/273/312/346, or 137/139/214/279, wherein the amino acid positions are relative to the reference sequence corresponding to residues 135-413 of SEQ ID NO: 4 or 628, or relative to the reference sequence corresponding to SEQ ID NO: 4 or 628.

[0016] In some embodiments, the amino acid sequence of the engineered protease polypeptide comprises at least a substitution or substitution set at amino acid position(s) 185, 134, 129, 135, 184, 132, 186, 193, 263, 370, 45/134, 199, 368, 161, 141, 267, 179, 264, 160, 138, 131, 372, 151, 274, 128, 339, 313, 374, 314, 191, 324, 315, 375, 136, 220, 194, 231, 277, 369, 251, 180, 163, 343, 264/279, 279, 232, 141/300, 367, 266, 188, 130, 318, 265, 341, 190, 145, 126/192, 11/220, 192, 370/392, 99/278, 265/311, 84/159/265/279/311/370, 311/316, 342/370, 265/311/370, 192/311/316, 141/154/192, 265/311/316/342, 279/311/316, 141/265/279/311/342, 141/192/311/316/370, 141/265/311, 198/279, 392, 342/370/392, 141/198/265, 265/392, 184/267, 342, 312, 100/251, 141/220, 311/316/370, 99, 278, 405, 311/342/370, 141/198, 311/342, 141/311, 279/311/377/392, 186/198/311/342/370/392, 141/392, 311/370/392, 141/311/392, 311/370, 311/316/392, 265/311/392, 141/192, 311, 141/265/311/392, 192/311/370/392, 198/265/311/316/370, 141/186/265/311, or 141/198/265/311/370, wherein the amino acid positions are relative to the reference sequence corresponding to residues 135-413 of SEQ ID NO: 4 or 628, or relative to the reference sequence corresponding to SEQ ID NO: 4 or 628.

[0017] In some embodiments, the amino acid sequence of the engineered protease polypeptide comprises at least a substitution at amino acid position 135, 137, 139, 141, 143, 145, 145, 157, 160, 214, 221, 268, 273, 279, 311, 312, 315, 315, 342, 345, 346, 402, 409, 410, 412, or 413, or combinations thereof, wherein the amino acid positions are relative to the reference sequence corresponding to residues 135-413 of SEQ ID NO: 4 or 628, or relative to the reference sequence corresponding to SEQ ID NO: 4 or 628.

[0018] In some embodiments, the amino acid sequence of the engineered protease polypeptide comprises at least a substitution or substitution set at amino acid position(s) 242, 157, 250, 373, 243, 336, 187, 240, 280, 271, 237, 386, 382, 328, 42, 391, 381, 275, 249, 239, 384, 139, 364, 346, 389, 254, 246, 345, 360, 303, 300, 269, 135/141/372, 311/315/372, 136/141/311, 141/188, 135/136, 135/141/315, 372, 135/141/160/267/372, 135/136/141/160/185/188/267/311/315, 160/185, 135/141/188/279/311, 135/136/141, 135/136/141/372, 135/141/160/185/267/279, 135/141/160/267, 141/188/311/372, 160/185/188/279/311, 136/141/279, 135/136/141/160/185/188, 141/372, 135/136/141/311, 185/311/315/372, 135/141/188, 136/185, 135/141, 135/136/141/279/315/372, 135/311/315, 141, 311/372, 188/311, 135/141/188/372, 141/160/279, 313/392, 342/392, 279/392, 128, 198/342, 313, 128/312, 50, 145/263, 313/342, 279/312, 312/392, 279/342, 128/342, 342, 263, 143, 262, 156, 169, 143/237, 136/160/185/267/311/372, 135/160/311/372, 135/141/311/315, 141/311/315, 136/141/160/185/188/311/315/372, 135/141/311/315/372, 135/141/160/185/311/315, 135/141/267/311/315/372, 135/136/141/160/311/315, 135/136/141/279, 135/141/267/279/311/315, 135/141/160, 135/141/160/311/315/372, 135/141/160/311/315, 135/136/141/188/311, 141/160/311, 135/141/160/279/311/315/372, 141/160/185/279/311/372, 135/136/141/160/315/372, 135/136/160/279/311/372, 128/279/312/342, 128/198/312/342, 263/342, 145/263/279/312/342/392, or 128/145/198/312/313/392, wherein the amino acid positions are relative to the reference sequence corresponding to residues 135-413 of SEQ ID NO: 4 or 628, or relative to the reference sequence corresponding to SEQ ID NO: 4 or 628.

[0019] In some embodiments, the amino acid sequence of the engineered protease polypeptide comprises at least a substitution as set forth in Tables 3.1, 3.2, 4.1, 4.2, 5.1, 5.2, 6.1, 7.1, 8.1, and 9.1, wherein the amino acid positions are relative to the reference sequence corresponding to residues 135-413 of SEQ ID NO: 4 or 628, or relative to the reference sequence corresponding to SEQ ID NO: 4 or 628.

[0020] In some embodiments, the amino acid sequence of the engineered protease polypeptide comprises at least a substitution or substitution set of an engineered set forth in Tables 3.1, 3.2, 4.1, 4.2, 5.1, 5.2, 6.1, 7.1, 8.1, and 9.1, wherein the amino acid positions are relative to the reference sequence corresponding to residues 135-413 of SEQ ID NO: 4 or 628, or relative to the reference sequence corresponding to SEQ ID NO: 4 or 628.

[0021] In some embodiments, the engineered protease polypeptide comprises an amino acid sequence having at least 70%, 75%, 80%, 81%, 82%, 83%, 84%, 85%, 86%, 87%, 88%, 89%, 90%, 91%, 92%, 93%, 94%, 95%, 96%, 97%, 98%, or 99%, or more sequence identity to a reference sequence corresponding to an amino acid sequence comprising at least a substitution or substitution set of an engineered protease polypeptide variant set forth in Tables 3.1, 3.2, 4.1, 4.2, 5.1, 5.2, 6.1, 7.1, 8.1, and 9.1, wherein the amino acid positions are relative to the reference sequence corresponding to residues 135-413 of SEQ ID NO: 4 or 628, or relative to the reference sequence corresponding to SEQ ID NO: 4 or 628.

[0022] In some embodiments, the engineered protease polypeptide comprises an amino acid sequence having at least 70%, 75%, 80%, 81%, 82%, 83%, 84%, 85%, 86%, 87%, 88%, 89%, 90%, 91%, 92%, 93%, 94%, 95%, 96%, 97%, 98%, or 99%, or more sequence identity to the reference sequence corresponding to residues 135-413 of SEQ ID NO: 948, 1126, 1368, or 1548, or to the reference sequence corresponding to SEQ ID NO: 948, 1126, 1368, or 1548.

[0023] In some embodiments, the engineered protease polypeptide comprises an amino acid sequence having at least 70%, 75%, 80%, 81%, 82%, 83%, 84%, 85%, 86%, 87%, 88%, 89%, 90%, 91%, 92%, 93%, 94%, 95%, 96%, 97%, 98%, or 99%, or more sequence identity to a reference sequence corresponding to residues 135-413 of an even-numbered SEQ ID NO. of SEQ ID NOs: 6-2242, or to a reference sequence corresponding to an even-numbered SEQ ID NO. of SEQ ID NOs: 6-2242.

[0024] In some embodiments, the engineered protease polypeptide comprises an amino acid sequence having at least 70%, 75%, 80%, 81%, 82%, 83%, 84%, 85%, 86%, 87%, 88%, 89%, 90%, 91%, 92%, 93%, 94%, 95%, 96%, 97%, 98%, or 99%, or more sequence identity to a reference sequence corresponding to residues 135-413 of an even-numbered SEQ ID NO. of SEQ ID NOs: 6-2242, or to a reference sequence corresponding to an even-numbered SEQ ID NO. of SEQ ID NOs: 6-2242, wherein the amino acid sequence comprises one or more substitutions relative to the reference sequence corresponding to residues 135-413 of SEQ ID NO: 948, 1126, 1368, or 1548, or relative to the reference sequence corresponding to SEQ ID NO: 948, 1126, 1368, or 1548.

[0025] In some embodiments, the engineered protease polypeptide comprises an amino acid sequence having at least 70%, 75%, 80%, 81%, 82%, 83%, 84%, 85%, 86%, 87%, 88%, 89%, 90%, 91%, 92%, 93%, 94%, 95%, 96%, 97%, 98%, or 99%, or more sequence identity to the reference sequence corresponding to residues 135-413 of SEQ ID NO: 948, 1126, 1368, or 1548, or to the reference sequence corresponding to SEQ ID NO: 948, 1126, 1368, or 1548, wherein the amino acid sequence comprises one or more substitutions relative to the reference sequence corresponding to residues 135-413 of SEQ ID NO: 948, 1126, 1368, or 1548, or relative to the reference sequence corresponding to SEQ ID NO: 948, 1126, 1368, or 1548.

[0026] In some embodiments, the amino acid sequence of the engineered protease polypeptide comprises at least a substitution at amino acid position 11, 31, 42, 45, 50, 53, 84, 99, 100, 126, 128, 129, 130, 131, 132, 134, 135, 136, 137, 138, 139, 140, 141, 143, 145, 151, 154, 156, 157, 159, 160, 161, 162, 163, 169, 172, 173, 174, 179, 180, 184, 185, 186, 187, 188, 190, 191, 192, 193, 194, 198, 199, 212, 214, 220, 221, 222, 223, 225, 231, 232, 233, 235, 237, 238, 239, 240, 242, 243, 245, 246, 249, 250, 251, 252, 253, 254, 256, 258, 262, 263, 264, 265, 266, 267, 268, 269, 271, 273, 274, 275, 277, 278, 279, 280, 281, 283, 285, 290, 292, 293, 294, 296, 297, 300, 302, 303, 311, 312, 313, 314, 315, 316, 318, 324, 328, 336, 339, 341, 342, 343, 345, 346, 355, 358, 360, 364, 367, 368, 369, 370, 371, 372, 373, 374, 375, 377, 381, 382, 384, 386, 389, 391, 392, 401, 402, 405, 406, 409, 410, 411, 412, or 413, or combinations thereof, wherein the amino acid positions are relative to the reference sequence corresponding to residues 135-413 of SEQ ID NO: 948, 1126, 1368, or 1548, or relative to the reference sequence corresponding to SEQ ID NO: 948, 1126, 1368, or 1548.

[0027] In some embodiments, the amino acid sequence of the engineered protease polypeptide comprises at least a substitution or amino acid residue 11K, 31G, 42W, 45Y, 50R, 53A, 84M, 99V, 100V, 126T, 128G/I/K/L/P/R/S/T/V, 129E/F/H/I/K/L/R/S/T/V, 130A/F/G/N/V, 131E/P/R/T/V/Y, 132A/C/D/E/G/P/R/V/Y, 134A/C/D/E/G/I/L/M/N/P/S/T/V/W/Y, 135A/C/E/G/H/I/K/L/M/N/P/R/S/T/V/W/Y, 136C/G/I/M, 137A/D/N/S, 138Q, 139C/D/E/F/H/I/K/L/M/N/R/S, 140L, 141A/C/D/E/F/G/H/I/L/M/N/Q/R/S/T/V/W/Y, 143A/C/D/H/N/Q/S/T, 145A/C/D/E/F/G/H/I/K/L/P/Q/R/S/T/V/W, 151D/Q, 154C/D/L/R, 156C/V, 157A/C/D/E/F/G/H/I/K/L/M/N/P/Q/R/S/T/V/W, 159G, 160A/C/D/E/F/K/L/M/N/P/R/Q/S/T/V/W/Y, 161D/E/G/L/R, 162I, 163H/L, 169S, 172Q, 173F/S, 174L, 179K/S, 180H/L/M, 184A/D/G/L/M/Q/R, 185A/D/E/F/G/L/M/P/Q/R/S/T/V, 186A/R/S/T/Y, 187A, 188A/C/D/F/G/L/M/S/T/W, 190S, 191R, 192C/D/M/N, 193T, 194A/D/L/T, 198G, 199C/K/L, 212S, 214A/C/D/E/F/G/H/I/K/L/M/N/P/Q/R/T/V/W/Y, 220K/L/R, 221A/C/D/E/F/G/H/I/K/L/M/P/Q/R/T/V/W/Y, 222G, 223S, 225V, 231H/V, 232S, 233G/I/L, 235Q/R/V, 237A/G, 238Q, 239L/M, 240A/L, 242E/S, 243E/L/M/R/S/T, 245L/V, 246I/V, 249G/M/S, 250A/C/F/L/N/T, 251D/S/T, 252P, 253C/I/V, 254C/E, 256L/M, 258W, 262A/S, 263E/H/P/Q/R/S, 264A/C/F/I/L/N/P/R/T/V, 265C/G/R, 266H/T/Y, 267A/G/H/I/L/M/R/S/T/V/W, 268A/F/G/H/I/N/P/Q/S/T/V/Y, 269Q/T, 271A, 273A/C/F/L/M/S/T/V, 274A/G/K/L/T/V/W, 275A/V, 277D/G, 278L/N/S/V/Y, 279A/E/F/G/H/K/L/M/R/S/T/Y/V/W, 280D/K/S/T, 281C/V, 283M, 285S, 290E/G/S, 292V, 293A, 294V/W, 296M/R, 297F, 300R/V, 302G/P, 303A/V, 311A/E/D/G/K/M/Q/S/T, 312A/C/D/E/G/H/I/K/L/M/N/P/Q/R/S/T/V/W/Y, 313A/Q/S/T, 314G, 315A/C/D/E/F/G/H/I/K/L/M/Q/R/S/T/V/W/Y, 316K, 318N/P/R, 324A/D/E/I/R/V/W/Y, 328L/M/V, 336F, 339S/W, 341G, 342A/C/D/E/F/G/I/K/M/N/P/R/Q/S/T/V/W/Y, 343S, 345A/C/D/E/F/G/I/K/L/M/Q/R/S/V/W/Y, 346A/C/D/F/G/K/L/M/N/P/Q/R/S/T/V/W/Y, 355A, 358S, 360S, 364A/V, 367V, 368G/T, 369I/V/W, 370C/E/F/G/I/K/L/P/Q/R/S/V, 371L, 372A/C/F/L/R/S/V/Y, 373A/C/E/F/M/S/Y, 374E/G/L/R/S/W/Y, 375A/E/I/L/M/S/T/V, 377H, 381N, 382G/R/S/T, 384C, 386P/W, 389C/P, 391L/S, 392Y, 401L, 402G/*, 405L/Q, 406C/M/R/W, 409E/R/*, 410C/I/W/*, 411L/R/T/V, 412P/T/*, or 413A/C/D/S/*, or combinations thereof, wherein the amino acid positions are relative to the reference sequence corresponding to residues 135-413 of SEQ ID NO: 948, 1126, 1368, or 1548, or relative to the reference sequence corresponding to SEQ ID NO: 948, 1126, 1368, or 1548.

[0028] In some embodiments, the amino acid sequence of the engineered protease polypeptide comprises at least a substitution at amino acid position 135, 137, 139, 141, 143, 157, 160, 214, 268, 273, 279, 311, 312, 315, 328, 342, 345, 346, or 372, or combinations thereof, wherein the amino acid positions are relative to the reference sequence corresponding to residues 135-413 of SEQ ID NO: 948, 1126, 1368, or 1548, or relative to the reference sequence corresponding to SEQ ID NO: 948, 1126, 1368, or 1548.

[0029] In some embodiments, the amino acid sequence of the engineered protease polypeptide comprises at least a substitution or amino acid residue 135A/C/E/G/H/I/K/L/M/N/P/R/S/T/V/W/Y, 137A/D/N/S, 139C/D/E/F/H/I/K/L/M/N/R/S, 141A/C/D/E/F/G/H/I/L/M/N/Q/R/S/T/V/W/Y, 143A/C/D/H/N/Q/S/T, 157A/C/D/E/F/G/H/I/K/L/M/N/P/Q/R/S/T/V/W, 160A/C/D/E/F/K/L/M/N/P/R/Q/S/T/V/W/Y, 214A/C/D/E/F/G/H/I/K/L/M/N/P/Q/R/T/V/W/Y, 268A/F/G/H/I/N/P/Q/S/T/V/Y, 273A/C/F/L/M/S/T/V, 279A/E/F/G/H/K/L/M/R/S/T/Y/V/W, 311A/E/D/G/K/M/Q/S/T, 312A/C/D/E/G/H/I/K/L/M/N/P/Q/R/S/T/V/W/Y, 315A/C/D/E/F/G/H/I/K/L/M/Q/R/S/T/V/W/Y, 328L/M/V, 342A/C/D/E/F/G/I/K/M/N/P/R/Q/S/T/V/W/Y, 345A/C/D/E/F/G/I/K/L/M/Q/R/S/V/W/Y, 346A/C/D/F/G/K/L/M/N/P/Q/R/S/T/V/W/Y, or 372A/C/F/L/R/S/V/Y, or combinations thereof, wherein the amino acid positions are relative to the reference sequence corresponding to residues 135-413 of SEQ ID NO: 948, 1126, 1368, or 1548, or to the reference sequence corresponding to SEQ ID NO: 948, 1126, 1368, or 1548.

[0030] In some embodiments, the engineered protease polypeptide comprises an amino acid sequence having at least 70%, 75%, 80%, 81%, 82%, 83%, 84%, 85%, 86%, 87%, 88%, 89%, 90%, 91%, 92%, 93%, 94%, 95%, 96%, 97%, 98%, or 99%, or more sequence identity to the reference sequence corresponding to residues 135-413 of SEQ ID NO: 948, or to the reference sequence corresponding to SEQ ID NO: 948, wherein the amino acid sequence comprises one or more substitutions relative to the reference sequence corresponding to residues 135-413 of SEQ ID NO: 948, or relative to the reference sequence corresponding to SEQ ID NO: 948.

[0031] In some embodiments, the engineered protease polypeptide comprises an amino acid sequence having at least 70%, 75%, 80%, 81%, 82%, 83%, 84%, 85%, 86%, 87%, 88%, 89%, 90%, 91%, 92%, 93%, 94%, 95%, 96%, 97%, 98%, or 99%, or more sequence identity to a reference sequence corresponding to residues 135-413 of an even-numbered SEQ ID NO. of SEQ ID NOs: 950-1154, or to a reference sequence corresponding to an even-numbered SEQ ID NO. of SEQ ID NOs: 950-1154, wherein the amino acid sequence comprises one or more substitutions relative to the reference sequence corresponding to residues 135-413 of SEQ ID NO: 948, or relative to the reference sequence corresponding to SEQ ID NO: 948.

[0032] In some embodiments, the amino acid sequence of the engineered protease polypeptide comprises at least a substitution or substitution set at amino acid position(s) 411, 402, 285, 245, 266, 355, 258, 222, 140, 268, 225, 283, 406, 410, 143/145/243/312, 139/143/145/157/312, 139/157/345, 139/269, 156/157/342/346, 139/143, 269, 139/243/328, 269/328, 143/145/169, 328, 143/145/262, 145/262/312/328, 139/156/157, 139/145/312, 312, 139, 139/312, 139/156, 139/143/145/243, 145/157, 145/346, 145/262/312/328/345/346, 145/262, 312/342, 143/243, 139/345, 342, 143/145/262/342, 139/143/169, 139/143/145/312, 169, 139/145/262/312/328/342/345/346, 139/328, 139/243, 139/143/328, 139/143/243, 139/145, 145/312, 145/169, 139/143/157/312, 84/139/143, 145/269, 143/145/157/269/312/328, 143/145/269, 157, 139/143/312, 256, 273, 409, 172, 401, 281, 253, 143/145/243/328, 145, 139/143/145/328/342/345, 143/328/342/345, 145/342/345, 143, 139/145/328/342/345, 143/145/169/312/328/345/346, 143/243/328/342/345/346, 139/143/157/169/328/346, 143/145/156/312/328, 139/145/157/312/328, 143/328/342/345/346, 143/145, 143/145/312/342/345, or 143/145/328, wherein the amino acid positions are relative to the reference sequence corresponding to residues 135-413 of SEQ ID NO: 948, or relative to the reference sequence corresponding to SEQ ID NO: 948.

[0033] In some embodiments, the engineered protease polypeptide comprises an amino acid sequence having at least 70%, 75%, 80%, 81%, 82%, 83%, 84%, 85%, 86%, 87%, 88%, 89%, 90%, 91%, 92%, 93%, 94%, 95%, 96%, 97%, 98%, or 99%, or more sequence identity to the reference sequence corresponding to residues 135-413 of SEQ ID NO: 1126, or to the reference sequence corresponding to SEQ ID NO: 1126, wherein the amino acid sequence comprises one or more substitutions relative to the reference sequence corresponding to residues 135-413 of SEQ ID NO: 1126, or relative to the reference sequence corresponding to SEQ ID NO: 1126.

[0034] In some embodiments, the engineered protease polypeptide comprises an amino acid sequence having at least 70%, 75%, 80%, 81%, 82%, 83%, 84%, 85%, 86%, 87%, 88%, 89%, 90%, 91%, 92%, 93%, 94%, 95%, 96%, 97%, 98%, or 99%, or more sequence identity to a reference sequence corresponding to residues 135-413 of an even-numbered SEQ ID NO. of SEQ ID NOs: 1156-1422, or to a reference sequence corresponding to an even-numbered SEQ ID NO. of SEQ ID NOs: 1156-1422, wherein the amino acid sequence comprises one or more substitutions relative to the reference sequence corresponding to residues 135-413 of SEQ ID NO: 1126, or relative to the reference sequence corresponding to SEQ ID NO: 1126.

[0035] In some embodiments, the amino acid sequence of the engineered protease polypeptide comprises at least a substitution or substitution set at amino acid position(s) 279, 250, 154, 214, 249, 275, 137, 161, 180, 174, 139, 254, 145, 278, 136, 154/413, 294, 237, 274, 264, 185, 277, 293, 233, 173, 312, 302, 238, 135, 221, 290, 263, 267, 239, 163, 292, 246, 243, 235, 156, 223, 278/413, 297, 194, 251, 253/411, 145/157/253/268/273/281/312/346/411, 139/346, 253, 346/411, 253/346, 312/346, 273/312, 253/281, 157/253/273/312/346/411, 139/157/253/268/273/281/312/346, 253/273/411, 139/253/268/273/281, 139/157/411, 157, 273, 139/253/268/273/281/312/411, 157/253/411, 139/145/253/346, 139/157/253/273/312, 139/157/268/273/312/346, 157/273/312/346, 139/411, 139/253/268/273/281/312/346/411, 157/273/346/411, 139/145/157/162/253/273/281/312, 139/253/273/281/312, 157/253/268/273/281/312, 139/253/268, 139/157/312, 253/273/281/346, 157/253/312/346/411, 157/273/312/346/411, 139/145/157/253/268/281/312, 139/273/312/346, 157/253/268/273/312/346, 139/268/346, 268/273/312/346, 139/157/253/268/273/312, 139/157/253, 139/253/281, 139/157/253/268/273, 253/312/411, or 139/268/273, wherein the amino acid positions are relative to the reference sequence corresponding to residues 135-413 of SEQ ID NO: 1126, or relative to the reference sequence corresponding to SEQ ID NO: 1126.

[0036] In some embodiments, the engineered protease polypeptide comprises an amino acid sequence having at least 70%, 75%, 80%, 81%, 82%, 83%, 84%, 85%, 86%, 87%, 88%, 89%, 90%, 91%, 92%, 93%, 94%, 95%, 96%, 97%, 98%, or 99%, or more sequence identity to the reference sequence corresponding to residues 135-413 of SEQ ID NO: 1368, or to the reference sequence corresponding to SEQ ID NO: 1368, wherein the amino acid sequence comprises one or more substitutions relative to the reference sequence corresponding to residues 135-413 of SEQ ID NO: 1368, or relative to the reference sequence corresponding to SEQ ID NO: 1368.

[0037] In some embodiments, the engineered protease polypeptide comprises an amino acid sequence having at least 70%, 75%, 80%, 81%, 82%, 83%, 84%, 85%, 86%, 87%, 88%, 89%, 90%, 91%, 92%, 93%, 94%, 95%, 96%, 97%, 98%, or 99%, or more sequence identity to a reference sequence corresponding to residues 135-413 of an even-numbered SEQ ID NO. of SEQ ID NOs: 1424-1608, or to a reference sequence corresponding to an even-numbered SEQ ID NO. of SEQ ID NOs: 1424-1608, wherein the amino acid sequence comprises one or more substitutions relative to the reference sequence corresponding to residues 135-413 of SEQ ID NO: 1368, or relative to the reference sequence corresponding to SEQ ID NO: 1368.

[0038] In some embodiments, the amino acid sequence of the engineered protease polypeptide comprises at least a substitution or substitution set at amino acid position(s) 31, 318, 296, 252, 303, 253, 413, 386, 312, 235, 412, 342, 302, 371, 405, 389, 391, 358, 139/273/311/328/372, 311, 372, 139/143/157/160/268/273/311/315, 143, 139/143, 139/160/312/372, 143/273/328, 346, 135/139/160/268/312/342/346, 139/141/273, 135/141/143/268/273/312/372, 139/141/143/311, 139/157/268/328/346/372, 53/139/141/143/273/372, 139, 139/141/143/273/312, 137/139/221/233/413, 233, 221/279, 137/139/233/279, 221, 139/214, 137/139/156, 139/214/221, 214/233, 137/139/221/233/279, 137/139/221, 137/139, 137/139/279, 137, 137/139/214/279, 266, 139/221, 137/221, 137/156/214/312, 137/221/233, 137/139/156/221, 137/139/214, 279, 137/139/233, 137/139/214/233, 221/413, 137/214/233, 137/156, 137/139/221/233, 214/221, 137/221/413, 214, 137/233, 137/413, 137/221/279, 137/139/156/214/233/413, or 137/139/156/214, wherein the amino acid positions are relative to the reference sequence corresponding to residues 135-413 of SEQ ID NO: 1368, or relative to the reference sequence corresponding to SEQ ID NO: 1368.

[0039] In some embodiments, the engineered protease polypeptide comprises an amino acid sequence having at least 70%, 75%, 80%, 81%, 82%, 83%, 84%, 85%, 86%, 87%, 88%, 89%, 90%, 91%, 92%, 93%, 94%, 95%, 96%, 97%, 98%, or 99%, or more sequence identity to the reference sequence corresponding to residues 135-413 of SEQ ID NO: 1548, or to the reference sequence corresponding to SEQ ID NO: 1548, wherein the amino acid sequence comprises one or more substitutions relative to the reference sequence corresponding to residues 135-413 of SEQ ID NO: 1548, or relative to the reference sequence corresponding to SEQ ID NO: 1548.

[0040] In some embodiments, the engineered protease polypeptide comprises an amino acid sequence having at least 70%, 75%, 80%, 81%, 82%, 83%, 84%, 85%, 86%, 87%, 88%, 89%, 90%, 91%, 92%, 93%, 94%, 95%, 96%, 97%, 98%, or 99%, or more sequence identity to a reference sequence corresponding to residues 135-413 of an even-numbered SEQ ID NO. of SEQ ID NOs: 1610-2242, or to a reference sequence corresponding to an even-numbered SEQ ID NO. of SEQ ID NOs: 1610-2242, wherein the amino acid sequence comprises one or more substitutions relative to the reference sequence corresponding to residues 135-413 of SEQ ID NO: 1548, or relative to the reference sequence corresponding to SEQ ID NO: 1548.

[0041] In some embodiments, the amino acid sequence of the engineered protease polypeptide comprises at least a substitution or substitution set at amino acid position(s) 145/273/372, 145/256/273, 221/243/273/328/372, 372, 145/221/279/372/406, 273/328, 145/169/273/346/406, 256/273, 145/221/273/328/346/406, 243/273, 145/214/256/273/279/328/372, 169/221/328/372/406, 372/406, 169/328/372/406, 221/372, 145/221/273/328/372, 214/243/273/328, 145/221, 214/256/273/346/372, 221/406, 169/372, 145/214/221/273, 145/221/346/372, 243/273/328/372/406, 145/169/273/328/346, 328, 169/273/372, 145/221/328, 169/214/273, 221/273/328, 221, 145/328, 214/346, 312, 212, 279, 212/312, 145, 179/346, 214, 346, 315/372, 375, 264, 179, 185, 220/372, or 324, wherein the amino acid positions are relative to the reference sequence corresponding to residues 135-413 of SEQ ID NO: 1548, or relative to the reference sequence corresponding to SEQ ID NO: 1548.

[0042] In some embodiments, the amino acid sequence of the engineered protease polypeptide comprises at least a substitution set forth in Tables 3.1, 3.2, 4.1, 4.2, 5.1, 5.2, 6.1, 7.1, 8.1, and 9.1, wherein the amino acid positions are relative to the reference sequence corresponding to residues 135-413 of SEQ ID NO: 4, 628, 948, 1126, 1368, or 1548, or relative to the reference sequence corresponding to SEQ ID NO: 4, 628, 948, 1126, 1368, or 1548.

[0043] In some embodiments, the amino acid sequence of the engineered protease polypeptide comprises at least a substitution or substitution set of an engineered protease polypeptide variant set forth in Tables 3.1, 3.2, 4.1, 4.2, 5.1, 5.2, 6.1, 7.1, 8.1, and 9.1, wherein the amino acid positions are relative to the reference sequence corresponding to residues 135-413 of SEQ ID NO: 4, 628, 948, 1126, 1368, or 1548, or relative to the reference sequence corresponding to SEQ ID NO: 4, 628, 948, 1126, 1368, or 1548.

[0044] In some embodiments, the engineered protease polypeptide comprises an amino acid sequence having at least 70%, 75%, 80%, 81%, 82%, 83%, 84%, 85%, 86%, 87%, 88%, 89%, 90%, 91%, 92%, 93%, 94%, 95%, 96%, 97%, 98%, or 99%, or more sequence identity to a reference sequence corresponding to an amino acid sequence comprising at least a substitution or substitution set of an engineered protease polypeptide variant set forth in Tables 3.1, 3.2, 4.1, 4.2, 5.1, 5.2, 6.1, 7.1, 8.1, and 9.1, wherein the amino acid positions are relative to the reference sequence corresponding to residues 135-413 of SEQ ID NO: 4, 628, 948, 1126, 1368, or 1548, or relative to the reference sequence corresponding to SEQ ID NO: 4, 628, 948, 1126, 1368, or 1548.

[0045] In some embodiments, the engineered protease polypeptide comprises an amino acid sequence comprising residues 135-413 of an even-numbered SEQ ID NO. of SEQ ID NOs: 6-2242, or an amino acid sequence comprising an even-numbered SEQ ID NO. of SEQ ID NOs: 6-2242.

[0046] In some embodiments, the engineered protease polypeptide comprises an amino acid sequence comprising residues 135-413 of SEQ ID NO: 628, 948, 1126, 1368, 1548, 1640, or 1710, or an amino acid sequence comprising SEQ ID NO: 628, 948, 1126, 1368, 1548, 1640, or 1710.

[0047] In some embodiments, the engineered protease polypeptide is capable of converting to a proteolytically active polypeptide or is an active protease. In some embodiments, the amino acid sequence of the engineered protease polypeptide comprises amino acid residues 135-413 or amino acid residues 128-413, wherein the engineered protease polypeptide is proteolytically active or is an active protease.

[0048] In some embodiments, the proteolytic active polypeptide or active protease of an engineered protease polypeptide is characterized by an improved property selected from: i) increased protease activity, ii) increased resistance to pepsin, iii) increased stability and/or activity at acidic pH, iv) increased stability and/or activity at neutral pH, or v) increased thermostability, or any combination of i), ii), iii), iv), and v) as compared to a reference protease. In some embodiments, the reference protease has an amino acid sequence corresponding to residues 135-413 of SEQ ID NO: 4, 628, 948, 1126, 1368, or 1548, or an amino acid sequence corresponding to SEQ ID NO: 4, 628, 948, 1126, 1368, or 1548. In some embodiments, the reference protease has an amino acid sequence corresponding to residues 135-413 of SEQ ID NO: 4 or 628, or an amino acid sequence corresponding to SEQ ID NO: 4, 628.

[0049] In some embodiments, the engineered protease polypeptide comprises at least a carboxy terminal deletion of SEQ ID NO: 2, wherein the deletion maintains protease activity of the mature form of SEQ ID NO: 2 with the carboxy terminal deletion. In some embodiments, the carboxy terminal deletion comprise deletion of the Big1 domain. In some embodiments, the carboxy terminal deletion is up to and including amino acid residue 426, or up to and including amino acid residue 414 of SEQ ID NO: 2. In some embodiments, the engineered protease polypeptide further comprises 1, 2, 3, 4, 5, 6, 7, 8, 9, or up to 10 amino acid deletions of the carboxy terminus at amino acid residue 413 of SEQ ID NO: 2, wherein the further amino acid deletion(s) maintains proteolytic activity of the mature form of SEQ ID NO: 2 having the further amino acid deletions. In some embodiments, the engineered protease polypeptide is the mature form having an amino terminus at amino acid residue 128 or 135 of SEQ ID NO: 2.

[0050] In another aspect, the present disclosure provides a recombinant polynucleotide comprising a polynucleotide sequence encoding an engineered protease polypeptide described herein.

[0051] In some embodiments, the recombinant polynucleotide comprises a polynucleotide sequence having at least 70%, 75%, 80%, 81%, 82%, 83%, 84%, 85%, 86%, 87%, 88%, 89%, 90%, 91%, 92%, 93%, 94%, 95%, 96%, 97%, 98%, or 99%, or more sequence identity to a reference polynucleotide sequence corresponding to nucleotide residues 403 to 1239 of SEQ ID NO: 3, 627, 947, 1125, 1367, or 1547, or to a reference polynucleotide corresponding to SEQ ID NO: 3, 627, 947, 1125, 1367, or 1547, wherein the recombinant polynucleotide encodes an engineered protease polypeptide.

[0052] In some embodiments, the recombinant polynucleotide comprises a polynucleotide sequence having at least 70%, 75%, 80%, 81%, 82%, 83%, 84%, 85%, 86%, 87%, 88%, 89%, 90%, 91%, 92%, 93%, 94%, 95%, 96%, 97%, 98%, or 99%, or more sequence identity to a reference polynucleotide sequence corresponding to nucleotide residues 403 to 1239 of an odd-numbered SEQ ID NO. of SEQ ID NOs: 5-2241, or to a reference polynucleotide corresponding to an odd-numbered SEQ ID NO. of SEQ ID NOs: 5-2241, wherein the recombinant polynucleotide encodes an engineered protease polypeptide.

[0053] In some embodiments, the polynucleotide sequence of the recombinant polynucleotide encoding an engineered protease polypeptide is codon optimized. In some embodiments, the polynucleotide sequence is codon optimized for expression in a bacterial cell, fungal cell, insect cell, or mammalian cell.

[0054] In some embodiments, the recombinant polynucleotide comprises a polynucleotide sequence comprising nucleotide residues 403-1239 of an odd-numbered SEQ ID NO. of SEQ ID NOs: 5-1709, or comprising an odd-numbered SEQ ID NO. of SEQ ID NOs: 5-1709.

[0055] In another aspect, the present disclosure further provides an expression vector comprising a recombinant polynucleotide encoding an engineered protease polypeptide described herein. In some embodiments, the expression vector further comprises a control sequence operably linked to the recombinant polynucleotide. In some embodiments, the control sequence comprises at least a promoter, particularly a heterologous promoter.

[0056] In another aspect, the present disclosure provides a host cell comprising an expression vector comprising a recombinant polynucleotide encoding an engineered protease polypeptide. In some embodiments, the host cell is a bacterial cell, fungal cell, insect cell, or mammalian cell.

[0057] In a further aspect, also provided is a method of producing an engineered protease polypeptide, comprising culturing a host cell described herein under suitable conditions such that the encoded engineered protease is expressed or produced. In some embodiments, the method further comprises isolating the expressed or produced engineered protease polypeptide from culture medium and/or cells.

[0058] In some embodiments, the method further comprises purifying the expressed or produced engineered protease polypeptide.

[0059] In some embodiments, provided herein is a method of preparing a proteolytically active protease polypeptide, comprising incubating an engineered protease polypeptide described herein under suitable conditions such that the proteolytically active protease polypeptide or active protease is produced. In some embodiments, the proteolytically active protease polypeptide or active protease has an amino terminus at amino acid residue 128 or 135, wherein the amino acid positions are numbered with respect to SEQ ID NO: 4, or equivalent positions thereof for any engineered protease polypeptide variant.

[0060] In some embodiments, the suitable conditions for preparing a proteolytically active protease polypeptide is sufficient for activation of the engineered protease polypeptide. In some embodiments, the method for preparing a proteolytically active protease comprises incubating the engineered protease polypeptide under suitable conditions for autoproteolysis. In some embodiments, the method for preparing a proteolytically active protease comprises contacting the engineered protease polypeptide with a proteolytically active polypeptide or an active protease of an engineered protease polypeptide described herein.

[0061] In another aspect, the engineered protease polypeptide is provided as a composition. In some embodiments, the composition comprises an engineered protease polypeptide and a protein-containing food or drink. In some embodiments, the composition comprises an engineered protease polypeptide admixed with a protein-containing food or drink.

[0062] In some embodiments, the engineered protease polypeptide is provided as a pharmaceutical composition. In some embodiments, the pharmaceutical composition further comprises a pharmaceutically acceptable excipient and/or carrier. In some embodiments, the pharmaceutical composition comprises an effective amount of the engineered protease for treating exocrine pancreatic insufficiency.

[0063] In some embodiments, the engineered protease polypeptide is used in the treatment of a condition or disease associated with a deficiency in pancreatic digestive enzymes. In some embodiments, a method of treating a disease or condition associated with a deficiency in pancreatic enzymes, comprises administering to a subject in need thereof an effective amount of an engineered protease polypeptide described herein or a pharmaceutical composition thereof. In some embodiments, the disease or condition associated with a deficiency in pancreatic digestive enzymes is exocrine pancreatic insufficiency.

[0064] In some embodiments, the engineered protease polypeptide or pharmaceutical composition thereof is administered immediately prior to, concurrently with, or subsequent to consumption of a protein-containing food or drink.

[0065] In some embodiments, the subject for treatment with an engineered protease polypeptide is a human infant or child. In some embodiments, the subject for treatment with an engineered protease polypeptide is a human adult.

[0066] In some embodiments, an engineered protease polypeptide is used for treating exocrine pancreatic insufficiency.

[0067] In some embodiments, an engineered protease polypeptide is used in the preparation of a medicament for treating exocrine pancreatic insufficiency.

### BRIEF DESCRIPTION OF THE DRAWINGS

[0068] FIG. 1 shows the full length naturally occurring amino acid sequence of the protease pro-polypeptide from Bacillus sinesaloumensis Marseille P3516 with a His-tag sequence (italicized) at the carboxy terminus. The polypeptide is composed of the pro-domain, which is within residues 1 to 127; a protease domain, which is within residues 128 to 413; and a bacterial Ig-like domain 1 (Big1-1), which is within residues 440 to 522.

[0069] FIG. 2 shows the naturally occurring amino acid sequence of the pro-polypeptide of the protease from Bacillus sinesaloumensis Marseille P3516 (SEQ ID NO: 4). The pro-polypeptide is converted to an active protease by cleavage between amino acid residues 127/128 and/or 134/135 in the illustrated sequence.

### DETAILED DESCRIPTION

[0070] The present disclosure provides engineered protease polypeptide, a proteolytically active engineered protease polypeptide, recombinant polynucleotides encoding the engineered protease polypeptides, and use of the engineered protease polypeptides. In some embodiments, the protease polypeptide is engineered to have advantageous properties compared to the naturally occurring protease, including among others, enhanced expression, increased proteolytic activity of the active protease, increased thermostability, increased resistance against other proteases, increased activity at acidic pH, and increased stability at acidic pH. In some embodiments, the enhanced properties of the engineered protease make is useful as a therapeutic in the treatment of exocrine pancreatic insufficiency, e.g., as enzyme replacement therapy (ERT).

### Abbreviations and Definitions

[0071] In reference to the present disclosure, the technical and scientific terms used in the descriptions herein will have the meanings commonly understood by one of ordinary skill in the art, unless specifically defined otherwise.

[0072] Furthermore, the headings provided herein are not limitations of the various aspects or embodiments of the invention which can be had by reference to the application as a whole.

[0073] It is to be understood that the invention herein is not limited to the particular methodology, protocols, and reagents described, as these may vary, depending upon the context they are used by those of skill in the art. Accordingly, the terms defined immediately below are more fully described by reference to the application as a whole.

[0074] As used herein, the singular “a”, “an,” and “the” include the plural references, unless the context clearly indicates otherwise.

[0075] As used herein, the term “comprising” and its cognates are used in their inclusive sense (i.e., equivalent to the term “including” and its corresponding cognates).

[0076] It is to be further understood that where description of embodiments use the term “comprising” and its cognates, the embodiments can also be described using language “consisting essentially of” or “consisting of.”

[0077] Numeric ranges are inclusive of the numbers defining the range. Thus, every numerical range disclosed herein is intended to encompass every narrower numerical range that falls within such broader numerical range, as if such narrower numerical ranges were all expressly written herein. It is also intended that every maximum (or minimum) numerical limitation disclosed herein includes every lower (or higher) numerical limitation, as if such lower (or higher) numerical limitations were expressly written herein.

[0078] “About” as used herein means an acceptable error for a particular value. In some instances, “about” means within 0.05%, 0.5%, 1.0%, or 2.0%, of a given value range. In some instances, “about” means within 1, 2, 3, or 4 standard deviations of a given value.

[0079] “EC” number refers to the Enzyme Nomenclature of the Nomenclature Committee of the International Union of Biochemistry and Molecular Biology (NC-IUBMB). The IUBMB biochemical classification is a numerical classification system for enzymes based on the chemical reactions they catalyze.

[0080] “ATCC” refers to the American Type Culture Collection whose biorepository collection includes genes and strains.

[0081] “NCBI” refers to National Center for Biological Information and the sequence databases provided therein.

[0082] “Polynucleotide” is used herein to denote a polymer comprising at least two nucleotides where the nucleotides are either deoxyribonucleotides or ribonucleotides. The abbreviations used for the genetically encoding nucleosides are conventional and are as follows: adenosine (A); guanosine (G); cytidine (C); thymidine (T); and uridine (U). Unless specifically delineated, the abbreviated nucleosides may be either ribonucleosides or 2′-deoxyribonucleosides. The nucleosides may be specified as being either ribonucleosides or 2′-deoxyribonucleosides on an individual basis or on an aggregate basis. When nucleic acid sequences are presented as a string of one-letter abbreviations, the sequences are presented in the 5′ to 3′ direction in accordance with common convention, and the phosphates are not indicated.

[0083] “Protein,” “polypeptide,” and “peptide” are used interchangeably to denote a polymer of at least two amino acids covalently linked by an amide bond, regardless of length or post-translational modification (e.g., glycosylation or phosphorylation). Unless indicated otherwise, amino acid sequences are written left to right in amino to carboxy orientation.

[0084] “Amino acids” are referred to herein by either their commonly known three-letter symbols or by the one-letter symbols recommended by IUPAC-IUB Biochemical Nomenclature Commission. The abbreviations used for the genetically encoded amino acids are conventional and are as follows: alanine (Ala or A), arginine (Arg or R), asparagine (Asn or N), aspartate (Asp or D), cysteine (Cys or C), glutamate (Glu or E), glutamine (Gln or Q), glycine (Gly or G), histidine (His or H), isoleucine (Ile or I), leucine (Leu or L), lysine (Lys or K), methionine (Met or M), phenylalanine (Phe or F), proline (Pro or P), serine (Ser or S), threonine (Thr or T), tryptophan (Trp or W), tyrosine (Tyr or Y), and valine (Val or V). When the three-letter abbreviations are used, unless specifically preceded by an “L” or a “D” or clear from the context in which the abbreviation is used, the amino acid may be in either the L- or D-configuration about α-carbon (Cα). For example, whereas “Ala” designates alanine without specifying the configuration about the α carbon, “D-Ala” and “L-Ala” designate D-alanine and L-alanine, respectively. When the one-letter abbreviations are used, upper case letters designate amino acids in the L-configuration about the α-carbon and lower case letters designate amino acids in the D-configuration about the α-carbon. For example, “A” designates L-alanine and “a” designates D-alanine. When polypeptide sequences are presented as a string of one-letter or three-letter abbreviations (or mixtures thereof), the sequences are presented in the amino (N) to carboxy (C) direction in accordance with common convention.

[0085] “Fusion protein” or “fusion polypeptide” refer to hybrid proteins created through the joining of two or more genes or polynucleotides that originally encoded separate proteins. In some embodiments, fusion proteins and fusion polypeptides are created by recombinant technology (e.g., molecular biology techniques known in the art).

[0086] “Protease,” “proteinase,” and “peptidase” refer to enzymes that hydrolyze proteins, polypeptides, and/or oligopeptides. Proteases, proteinases, and peptidases breakdown proteins, polypeptides, or oligonucleotides into smaller peptides or single amino acids.

[0087] “Proteolysis” or “proteolytic activity” refers to the breakdown (e.g., through hydrolysis) of proteins and/or polypeptides into smaller peptides and/or amino acids.

[0088] “Auto-proteolysis” refers to the self breakdown of the subject protein, for example the breakdown of proteases through their own action on their structures.

[0089] “Lipase” refers to any enzyme commonly referred to as “lipase” that catalyzes the hydrolysis of fats by hydrolyzing the ester bonds of triglycerides. Pancreatic lipases are important in the breakdown of fats to fatty acids, glycerol, and other alcohols. Lipases are essential in the digestion, transport, and processing of dietary lipids in most organisms.

[0090] “Lipid” refers to a class of water-insoluble macromolecules that include fatty acids and their esters, sterols, prenols, certain poorly soluble vitamins, and other related compounds. “Fats” are a subset of lipids composed of fatty acid esters (e.g., triglycerides, which are made from glycerol and three fatty acids). It is not intended that the present invention be limited to any specific lipid and/or fat. Taking the context into consideration, the terms “fat” and “lipid” are used interchangeably herein.

[0091] “Amylase” refers to an enzyme that is capable of hydrolyzing glycosidic bonds in starch to converting it to smaller polysaccharides, such as disaccharides (e.g., maltose) and trisaccharides, or simple sugars, such as glucose.

[0092] “Mature protein” or “mature polypeptide” refers to the final processed biological protein or polypeptide or product.

[0093] “Pro-protein,” “pro-polypeptide,” or “pro-peptide” refers to a precursor protein, polypeptide, or peptide that is processed by post-translational modification, to form a biologically active protein, polypeptide, or peptide. In some embodiments, the post translational modification is a cleavage reaction to form the protein, polypeptide, or peptide. “Pro-enzyme” refers to a precursor polypeptide that is processed by post-translational modification, in particular a cleavage reaction, to form an active enzyme.

[0094] “Pre-pro-protein,” “pre-pro-polypeptide,” or “pre-pro-peptide” refers to a precursor protein, polypeptide, or peptide that includes a signal sequence and which can be processed by posttranslational modification, in particular a cleavage reaction, to generate a pro-protein, pro-polypeptide, or pro-peptide. Generally, a cleavage reaction removes a signal sequence to generate a pro-protein, pro-polypeptide, or pro-peptide. “Pre-pro-enzyme” refers to a precursor protein, polypeptide, or peptide that is processed by post-translational modification, in particular a cleavage reaction that removes a signal sequence, to form a pro-enzyme.

[0095] “Full-length” in context of a protein or polypeptide refers to the protein or polypeptide which is not processed to alter the amino acid sequence of the entire protein or polypeptide. For example, a full-length protein is the entire protein encoded in the corresponding mRNA.

[0096] “Engineered,” “recombinant,” “non-naturally occurring,” and “variant,” when used with reference to a cell, a polynucleotide or a polypeptide refers to a material or a material corresponding to the natural or native form of the material that has been modified in a manner that would not otherwise exist in nature or is identical thereto but produced or derived from synthetic materials and/or by manipulation using recombinant techniques.

[0097] “Wild-type” and “naturally-occurring” refer to the form found in nature. For example, a wild-type polypeptide or polynucleotide sequence is a sequence present in an organism that can be isolated from a source in nature and which has not been intentionally modified by human manipulation.

[0098] “Coding sequence” refers to that part of a nucleic acid (e.g., a gene) that encodes an amino acid sequence of a protein.

[0099] “Percent (%) sequence identity” is used herein to refer to comparisons among polynucleotides and polypeptides, and are determined by comparing two optimally aligned sequences over a comparison window, wherein the portion of the polynucleotide or polypeptide sequence in the comparison window may comprise additions or deletions (i.e., gaps) as compared to the reference sequence for optimal alignment of the two sequences. The percentage may be calculated by determining the number of positions at which the identical nucleic acid base or amino acid residue occurs in both sequences to yield the number of matched positions, dividing the number of matched positions by the total number of positions in the window of comparison and multiplying the result by 100 to yield the percentage of sequence identity. Alternatively, the percentage may be calculated by determining the number of positions at which either the identical nucleic acid base or amino acid residue occurs in both sequences or a nucleic acid base or amino acid residue is aligned with a gap to yield the number of matched positions, dividing the number of matched positions by the total number of positions in the window of comparison and multiplying the result by 100 to yield the percentage of sequence identity. Those of skill in the art appreciate that there are many established algorithms available to align two sequences. Optimal alignment of sequences for comparison can be conducted (e.g., by the local homology algorithm of Smith and Waterman; Smith and Waterman, Adv. Appl. Math., 1981, 2:482), by the homology alignment algorithm of Needleman and Wunsch (Needleman and Wunsch, J. Mol. Biol., 1970, 48:443), by the search for similarity method of Pearson and Lipman (Pearson and Lipman, Proc. Natl. Acad. Sci. USA., 1988, 85:2444), by computerized implementations of these algorithms (e.g., GAP, BESTFIT, FASTA, and TFASTA in the GCG Wisconsin Software Package), or by visual inspection, as known in the art. Examples of algorithms that are suitable for determining percent sequence identity and sequence similarity include, but are not limited to the BLAST and BLAST 2.0 algorithms (see, e.g., Altschul et al., J. Mol. Biol., 1990, 215:403-410; and Altschul et al., Nucleic Acids Res., 1977, 25:3389-3402). Software for performing BLAST analyses is publicly available through the National Center for Biotechnology Information website. This algorithm involves first identifying high scoring sequence pairs (HSPs) by identifying short words of length “W” in the query sequence, which either match or satisfy some positive-valued threshold score “T,” when aligned with a word of the same length in a database sequence. T is referred to as the neighborhood word score threshold (See, Altschul et al., supra). These initial neighborhood word hits act as seeds for initiating searches to find longer HSPs containing them. The word hits are then extended in both directions along each sequence for as far as the cumulative alignment score can be increased. Cumulative scores are calculated using, for nucleotide sequences, the parameters “M” (reward score for a pair of matching residues; always >0) and “N” (penalty score for mismatching residues; always <0). For amino acid sequences, a scoring matrix is used to calculate the cumulative score. Extension of the word hits in each direction are halted when: the cumulative alignment score falls off by the quantity “X” from its maximum achieved value; the cumulative score goes to zero or below, due to the accumulation of one or more negative-scoring residue alignments; or the end of either sequence is reached. The BLAST algorithm parameters W, T, and X determine the sensitivity and speed of the alignment. The BLASTN program (for nucleotide sequences) uses as defaults a wordlength (W) of 11, an expectation (E) of 10, M=5, N=−4, and a comparison of both strands. For amino acid sequences, the BLASTP program uses as defaults a wordlength (W) of 3, an expectation (E) of 10, and the BLOSUM62 scoring matrix (see, e.g., Henikoff and Henikoff, Proc. Natl. Acad. Sci. USA, 1989, 89:10915). Exemplary determination of sequence alignment and % sequence identity can employ the BESTFIT or GAP programs in the GCG Wisconsin Software package (Accelrys, Madison WI), using default parameters provided.

[0100] “Reference sequence” refers to a defined sequence used as a basis for a sequence comparison. A reference sequence may be a subset of a larger sequence, for example, a segment of a full-length gene or polypeptide sequence. Generally, a reference sequence is at least 20 nucleotide or amino acid residues in length, at least 25 residues in length, at least 50 residues in length, at least 100 residues in length or the full-length of the nucleic acid or polypeptide. Since two polynucleotides or polypeptides may each (1) comprise a sequence (i.e., a portion of the complete sequence) that is similar between the two sequences, and (2) may further comprise a sequence that is divergent between the two sequences, sequence comparisons between two (or more) polynucleotides or polypeptide are typically performed by comparing sequences of the two polynucleotides or polypeptides over a “comparison window” to identify and compare local regions of sequence similarity. In some embodiments, a “reference sequence” can be based on a primary amino acid sequence, where the reference sequence is a sequence that can have one or more changes in the primary sequence.

[0101] “Comparison window” refers to a conceptual segment of contiguous nucleotide positions or amino acids residues wherein a sequence may be compared to a reference sequence. In some embodiments, the comparison window is at least 15 to 20 contiguous nucleotides or amino acids and wherein the portion of the sequence in the comparison window may comprise additions or deletions (i.e., gaps) of 20 percent or less as compared to the reference sequence (which does not comprise additions or deletions) for optimal alignment of the two sequences. In some embodiments, the comparison window can be longer than 15-20 contiguous residues, and includes, optionally 30, 40, 50, 100, or longer windows.

[0102] “Corresponding to,” “reference to,” and “relative to” when used in the context of the numbering of a given amino acid or polynucleotide sequence refer to the numbering of the residues of a specified reference sequence when the given amino acid or polynucleotide sequence is compared to the reference sequence. In other words, the residue number or residue position of a given polymer is designated with respect to the reference sequence rather than by the actual numerical position of the residue within the given amino acid or polynucleotide sequence. For example, a given amino acid sequence, such as that of an engineered protease polypeptide, can be aligned to a reference sequence by introducing gaps to optimize residue matches between the two sequences. In these cases, although the gaps are present, the numbering of the residue in the given amino acid or polynucleotide sequence is made with respect to the reference sequence to which it has been aligned.

[0103] “Mutation” refers to any change in a polypeptide or polynucleotide sequence. It is intended to encompass any number (i.e., one or more) of substitutions, insertions, deletions, and/or rearrangements present in a sequence (i.e., as compared to the starting or reference sequence). Thus, mutations in polynucleotide sequences can result in the production of variant polypeptides (e.g., variant or engineered proteases), as provided herein. In some embodiments, where the reference sequence is a subsequence of a longer sequence, amino acid positions and corresponding mutations (e.g., substitutions) or mutation sets within the subsequence are selected.

[0104] “Amino acid difference” and “residue difference” refer to a difference in the amino acid residue at a position of a polypeptide sequence relative to the amino acid residue at a corresponding position in a reference sequence. The positions of amino acid differences generally are referred to herein as “Xn,” where n refers to the corresponding position in the reference sequence upon which the residue difference is based. For example, a “residue difference at position X135 as compared to SEQ ID NO: 4” (or a “residue difference at position 135 as compared to SEQ ID NO: 4”) refers to a difference of the amino acid residue at the polypeptide position corresponding to position 135 of SEQ ID NO: 4. Thus, if the reference polypeptide of SEQ ID NO: 4 has an alanine at position 135, then a “residue difference at position X135 as compared to SEQ ID NO: 4” refers to an amino acid substitution with any residue other than alanine at the position of the polypeptide corresponding to position 135 of SEQ ID NO: 4. In some instances herein, the specific amino acid residue difference at a position is indicated as “XnY” where “Xn” specifies the corresponding residue and position of the reference polypeptide (as described above), and “Y” is the single letter identifier of the amino acid found in the engineered or recombinant polypeptide (i.e., the different residue than in the reference polypeptide). In some embodiments, the amino acid difference, e.g., a substitution, is denoted by the abbreviation “nY,” without the identifier for the residue in the reference sequence. In some embodiments, the phrase “an amino acid residue nY” denotes the presence of the amino residue in the engineered or recombinant polypeptide, which may or may not be a substitution in context of a reference sequence. In some embodiments, the “substitution” comprises the deletion of an amino acid, which can be denoted by “−”, or a replacement with a termination codon, which can be denoted by “*”.

[0105] In some instances, a polypeptide of the present disclosure can include one or more amino acid residue differences relative to a reference sequence, which is indicated by a list of the specified positions where residue differences are present relative to the reference sequence. In some embodiments, where more than one amino acid can be used in a specific residue position of a polypeptide, the various amino acid residues that can be used are separated by a “/” (e.g., X151D/X151Q, X151D/Q, or 151D/Q).

[0106] “Amino acid substitution set” and “substitution set” refers to a group of amino acid substitutions within a polypeptide sequence. In some embodiments, substitution sets comprise 2, 3, 4, 5, 6, 7, 8, 9, 10, 11, 12, 13, 14, 15, or more amino acid substitutions. In some embodiments, a substitution set refers to the set of amino acid substitutions that is present in any of the variant protease polypeptides listed in any of the Tables in the Examples. In these substitution sets, the individual substitutions are separated by a semicolon (“;”; e.g., A126T;G192C) or slash (“/”; e.g., A126T/G192C or 126T/192C). In some embodiments, the phrase “mutation set” can be used.

[0107] “Conservative amino acid substitution” refers to a substitution of a residue with a different residue having a similar side chain, and thus typically involves substitution of the amino acid in the polypeptide with amino acids within the same or similar defined class of amino acids. By way of example and not limitation, an amino acid with an aliphatic side chain may be substituted with another aliphatic amino acid (e.g., alanine, valine, leucine, and isoleucine); an amino acid with hydroxyl side chain is substituted with another amino acid with a hydroxyl side chain (e.g., serine and threonine); an amino acids having aromatic side chains is substituted with another amino acid having an aromatic side chain (e.g., phenylalanine, tyrosine, tryptophan, and histidine); an amino acid with a basic side chain is substituted with another amino acid with a basis side chain (e.g., lysine and arginine); an amino acid with an acidic side chain is substituted with another amino acid with an acidic side chain (e.g., aspartic acid or glutamic acid); and/or a hydrophobic or hydrophilic amino acid is replaced with another hydrophobic or hydrophilic amino acid, respectively.

[0108] “Non-conservative substitution” refers to substitution of an amino acid in the polypeptide with an amino acid with significantly differing side chain properties. Non-conservative substitutions may use amino acids between, rather than within, the defined groups and affects (a) the structure of the peptide backbone in the area of the substitution (e.g., proline for glycine) (b) the charge or hydrophobicity, or (c) the bulk of the side chain. By way of example and not limitation, an exemplary non-conservative substitution can be an acidic amino acid substituted with a basic or aliphatic amino acid; an aromatic amino acid substituted with a small amino acid; and a hydrophilic amino acid substituted with a hydrophobic amino acid.

[0109] “Deletion” refers to modification to the polypeptide by removal of one or more amino acids from the reference polypeptide. Deletions can comprise removal of 1 or more amino acids, 2 or more amino acids, 5 or more amino acids, 10 or more amino acids, 15 or more amino acids, or 20 or more amino acids, up to 10% of the total number of amino acids, or up to 20% of the total number of amino acids making up the reference enzyme while retaining enzymatic activity and/or retaining the properties of a protease polypeptide. Deletions can be directed to the internal portions and/or terminal portions of the polypeptide. In various embodiments, the deletion can comprise a continuous segment or can be discontinuous.

[0110] “Insertion” refers to modification to the polypeptide by addition of one or more amino acids from the reference polypeptide. Insertions can be in the internal portions of the polypeptide, or to the carboxy or amino terminus. Insertions as used herein include fusion proteins as is known in the art. The insertion can be a contiguous segment of amino acids or separated by one or more of the amino acids in the naturally occurring polypeptide.

[0111] “Functional fragment” and “biologically active fragment” are used interchangeably herein, to refer to a polypeptide that has an amino-terminal and/or carboxy-terminal deletion(s) and/or internal deletions, but where the remaining amino acid sequence is identical to the corresponding positions in the sequence to which it is being compared (e.g., a full-length engineered protease polypeptide) and that retains substantially all of the activity of the full-length polypeptide.

[0112] “Isolated polypeptide” refers to a polypeptide which is substantially separated from other contaminants that naturally accompany it (e.g., protein, lipids, and polynucleotides). The term embraces polypeptides which have been removed or purified from their naturally-occurring environment or expression system (e.g., host cell or in vitro synthesis). The engineered protease polypeptides may be present within a cell, present in the cellular medium, or prepared in various forms, such as lysates or isolated preparations. As such, in some embodiments, the engineered protease polypeptides provided herein are isolated polypeptides.

[0113] “Substantially pure polypeptide” or “purified polypeptide” refers to a composition in which the polypeptide species is the predominant species present (i.e., on a molar or weight basis it is more abundant than any other individual macromolecular species in the composition), and is generally a substantially purified composition when the object species comprises at least about 50 percent of the macromolecular species present by mole or % weight. Generally, a substantially pure protease polypeptide composition will comprise about 60% or more, about 70% or more, about 80% or more, about 90% or more, about 95% or more, and about 98% or more of all macromolecular species by mole or % weight present in the composition. In some embodiments, the object species is purified to essential homogeneity (i.e., contaminant species cannot be detected in the composition by conventional detection methods) wherein the composition consists essentially of a single macromolecular species. Solvent species, small molecules (<500 Daltons), and elemental ion species are not considered macromolecular species. In some embodiments, the isolated engineered protease polypeptides are substantially pure polypeptide compositions.

[0114] “Improved enzyme property” and “improved property” refers to a property of an engineered protease polypeptide which comprises an improvement in any enzyme property as compared to a reference protease polypeptide and/or as a wild-type protease polypeptide or another engineered protease polypeptide. Improved properties include but are not limited to such properties as increased protein expression, increased thermostability, increased pH activity, increased stability, increased enzymatic activity, increased substrate specificity or affinity, increased chemical stability, improved solvent stability, increased tolerance to acidic or basic pH, increased tolerance to protease activity (i.e., reduced sensitivity to proteolysis), reduced aggregation, increased solubility, and altered temperature profile.

[0115] “Increased enzymatic activity” or “enhanced catalytic activity” refers to an improved property of the engineered protease polypeptides, that can be represented by an increase in specific activity (e.g., product produced/time/weight protein) or an increase in percent conversion of the substrate to the product (e.g., percent conversion of starting amount of substrate to product in a specified time period using a specified amount of protease) as compared to the reference protease enzyme. Exemplary methods to determine enzyme activity are provided in the Examples. Any property relating to enzyme activity may be affected, including the classical enzyme properties of Kₘ, Vₘₐₓ or k_{cat}, changes of which can lead to increased enzymatic activity. Improvements in enzyme activity can be from about 1.1 fold the enzymatic activity of the corresponding wild-type enzyme, to as much as 2-fold, 5-fold, 10-fold, 20-fold, 25-fold, 50-fold, 75-fold, 100-fold, 150-fold, 200-fold or more enzymatic activity than the naturally occurring protease or another engineered protease from which the protease polypeptides were derived.

[0116] “Protease stable” and “stability to proteolysis” refer to the ability of a protein (e.g., an engineered protease of the present invention) to function and withstand proteolysis mediated by any proteolytic enzyme or other proteolytic compound or factor and retain its function following treatment with the protease. It is not intended that the term be limited to the use of any particular protease to assess the stability of a protein. In some embodiments, the engineered proteases are stable in the presence of a gastric protease.

[0117] “pH stability” refers to the ability of a protein (e.g., an engineered protease of the present invention) to function after incubation at a particular pH. In some embodiments, the present disclosure provides engineered proteases that are stable at a range of pHs, including, acid, neutral, and/or basic pH. In some embodiments, the engineered proteases are stable at different pH ranges, as indicated in the Examples provided herein.

[0118] “Physiological pH” refers to the pH range generally found in a subject's (e.g., human) blood (e.g., pH 7.2-7.4).

[0119] “Basic pH” (e.g., used with reference to improved stability to basic pH conditions or increased tolerance to basic pH) means a pH range of >7, for example >pH 7 to 11, or in some embodiments, greater than pH 11.

[0120] “Acidic pH” (e.g., used with reference to improved stability to acidic pH conditions or increased tolerance to acidic pH) means a pH range that encompasses any pH values <7. In some embodiments, the acid pH is less than 7, while in some other embodiments, the pH is less than about 6, 5, 4, 3, 2, or lower. In some alternative embodiments, the engineered proteases of the present disclosure are stable at pH levels of 2 to 4.

[0121] “Improved tolerance to acidic pH” means that an engineered protease according to the invention will have increased stability (higher retained activity at <pH 7, e.g., 6, 5, 4 3, 2, or even lower, after exposure to the acidic pH for a specified period of time (e.g., 1 hour, up to 24 hours, etc.) as compared to a reference protease or another enzyme.

[0122] “Improved tolerance to basic pH” means that an engineered protease according to the invention will have increased stability (higher retained activity at about pH >7, e.g., 8, or 9, or even higher, after exposure to basic pH for a specified period of time, e.g., 1 hour, up to 24 hours, etc., as compared to a reference protease or another enzyme.

[0123] “Gastric challenge” refers to the exposure of the engineered proteases of the present invention to a low pH environment and the presence of at least one gastric enzyme, such as a protease (e.g., pepsin), such that the recombinant protease is exposed to the conditions that may be encountered in the stomach (e.g., the human stomach).

[0124] “Thermal stability” and “thermostability” refer to the ability of a protein (e.g., an engineered protease of the present invention) to function at a particular temperature. In some embodiments, the term refers to the ability of a protein to function following incubation at a particular temperature. In some embodiments, the engineered proteases of the present invention are “thermotolerant” (i.e., the enzymes maintain their catalytic activity at elevated temperatures). In some embodiments, the engineered proteases resist inactivation at elevated temperatures and in some embodiments, maintain catalytic activity at elevated temperatures for prolonged exposure times. In some embodiments, thermal stability is measured following incubation of a protein (e.g., an engineered protease of the present invention) at a particular temperature.

[0125] “Suitable reaction conditions” refers to those conditions in the enzymatic conversion reaction solution (e.g., ranges of enzyme loading, substrate loading, temperature, pH, buffers, co-solvents, etc.) under which a protease polypeptide of the present application is capable of converting a substrate to the desired product compound. Exemplary “suitable reaction conditions” are provided in the present application and illustrated by the Examples.

[0126] “Codon optimized” refers to changes in the codons of the polynucleotide encoding a protein to those preferentially used in a particular organism such that the encoded protein is more efficiently expressed in that organism. Although the genetic code is degenerate, in that most amino acids are represented by several codons, called “synonyms” or “synonymous” codons, it is well known that codon usage by particular organisms is nonrandom and biased towards particular codon triplets. This codon usage bias may be higher in reference to a given gene, genes of common function or ancestral origin, highly expressed proteins versus low copy number proteins, and the aggregate protein coding regions of an organism's genome. In some embodiments, the polynucleotides encoding the protease polypeptide are codon optimized for optimal production from the host organism selected for expression.

[0127] “Control sequence” refers herein to include all components that are necessary or advantageous for the expression of a polynucleotide and/or polypeptide of the present disclosure. Each control sequence may be native or foreign to the nucleic acid sequence encoding the polypeptide. Such control sequences include, but are not limited to, leaders, polyadenylation sequences, pro-peptide sequences, promoter sequences, signal peptide sequences, initiation sequences, and transcription terminators. In some embodiments, at a minimum, the control sequences include a promoter, and transcriptional and translational stop signals.

[0128] “Operably linked” is defined herein as a configuration in which a control sequence is appropriately placed (i.e., in a functional relationship) at a position relative to a polynucleotide of interest such that the control sequence directs or regulates the expression of the polynucleotide and/or encoded polypeptide of interest.

[0129] “Heterologous” or “recombinant” refers to the relationship between two or more nucleic acid or polypeptide sequences (e.g., a promoter sequence, signal peptide, terminator sequence, etc.) that are derived from different sources and are not associated in nature.

[0130] “Promoter sequence” refers to a nucleic acid sequence that is recognized by a host cell for expression of a polynucleotide of interest, such as a coding sequence. The promoter sequence contains transcriptional control sequences, which mediate the expression of a polynucleotide of interest. The promoter may be any nucleic acid sequence which shows transcriptional activity in the host cell of choice including mutant, truncated, and hybrid promoters, and may be obtained from genes encoding extracellular or intracellular polypeptides either homologous or heterologous to the host cell.

[0131] “Vector” refers to a polynucleotide construct for introducing a polynucleotide sequence into a cell. In some embodiments, the vector is an expression vector that is operably linked to a suitable control sequence capable of effecting the expression in a suitable host of the polypeptide encoded in the polynucleotide sequence. In some embodiments, an “expression vector” has a promoter sequence operably linked to the polynucleotide sequence (e.g., transgene) to drive expression in a host cell, and in some embodiments, also comprises a transcription terminator sequence.

[0132] “Culturing” refers to the growing of a population of cells, such as host cells, under suitable conditions using any suitable medium (e.g., liquid, gel, or solid). In some embodiments, the cells are microbial cells (e.g., bacteria), while in some other embodiments, the cells are mammalian cells, insect cells, or cells obtained from another animal. It is not intended that the present invention be limited to culturing of any particular cells or cell types or any specific method of culturing.

[0133] “Expression” includes any step involved in the expression of a polypeptide including, but not limited to, transcription, post-transcriptional modification, translation, and post-translational modification. In some embodiments, the term also encompasses secretion of the polypeptide from a cell. “Produces” refers to the expression of proteins and/or other compounds by cells.

[0134] “Host cell” and “host strain” refer to suitable hosts for expression vectors comprising polynucleotides provided herein (e.g., a polynucleotide sequences encoding at least one protease polypeptide). In some embodiments, the host cells are prokaryotic or eukaryotic cells that have been transformed or transfected with vectors constructed using recombinant techniques as known in the art.

[0135] “Hybridization stringency” relates to hybridization conditions, such as washing conditions, in the hybridization of nucleic acids. Generally, hybridization reactions are performed under conditions of lower stringency, followed by washes of varying but higher stringency. The term “moderately stringent hybridization” refers to conditions that permit target-DNA to bind a complementary nucleic acid that has about 60% identity, preferably about 75% identity, about 85% identity to the target DNA, with greater than about 90% identity to target-polynucleotide. Exemplary moderately stringent conditions are conditions equivalent to hybridization in 50% formamide, 5×Denhart's solution, 5×SSPE, 0.2% SDS at 42° C., followed by washing in 0.2×SSPE, 0.2% SDS, at 42° C. “High stringency hybridization” refers generally to conditions that are about 10° C. or less from the thermal melting temperature Tm as determined under the solution condition for a defined polynucleotide sequence. In some embodiments, a high stringency condition refers to conditions that permit hybridization of only those nucleic acid sequences that form stable hybrids in 0.018M NaCl at 65° C. (i.e., if a hybrid is not stable in 0.018M NaCl at 65° C., it will not be stable under high stringency conditions, as contemplated herein). High stringency conditions can be provided, for example, by hybridization in conditions equivalent to 50% formamide, 5×Denhart's solution, 5×SSPE, 0.2% SDS at 42° C., followed by washing in 0.1×SSPE, and 0.1% SDS at 65° C. Another high stringency condition is hybridizing in conditions equivalent to hybridizing in 5×SSC containing 0.1% (w:v) SDS at 65° C. and washing in 0.1×SSC containing 0.1% SDS at 65° C. Other high stringency hybridization conditions, as well as moderately stringent conditions, are described in the references cited above.

[0136] “Composition” and “formulation” encompass products comprising at least one engineered protease of the present invention, intended for any suitable use (e.g., pharmaceutical compositions, dietary and/or nutritional supplements, etc.).

[0137] “Pharmaceutical composition” refers to a composition suitable for pharmaceutical use in a subject (e.g., human).

[0138] “Pharmaceutically acceptable” means a material that can be administered to a subject without causing any undesirable biological effects or interacting in a deleterious manner with any of the components in which it is contained and that possesses the desired biological activity.

[0139] “Excipient” refers to any pharmaceutically acceptable additive, carrier, diluent, adjuvant, or other ingredient, other than the active pharmaceutical ingredient. Excipients are typically included for formulation and/or administration purposes.

[0140] “Carrier” when used in reference to a pharmaceutical composition means any of the standard pharmaceutical carrier, buffers, and excipients, such as stabilizers, preservatives, and adjuvants.

[0141] “Administration” and “administering” a composition mean providing a composition of the present invention to a subject, such as a patient.

[0142] “Concurrent administration,” or “co-treatment,” as used herein includes administration of the agents together, or before or after each other.

[0143] “Effective amount” means an amount sufficient to produce the desired result. One of general skill in the art may determine what the effective amount by using experimentation.

[0144] “Therapeutically effective amount” when used in reference to symptoms of disease/condition refers to the amount and/or concentration of a compound (e.g., engineered protease polypeptides) that ameliorates, attenuates, or eliminates one or more symptom of a disease/condition or prevents or delays the onset of symptom(s). A “therapeutically effective amount” when used in reference to a disease/condition refers to the amount and/or concentration of a composition (e.g., engineered protease polypeptides) that ameliorates, attenuates, or eliminates the disease/condition. In some embodiments, the term is used in reference to the amount of a composition that elicits the biological (e.g., medical) response by a tissue, system, or animal subject that is sought by the researcher, physician, veterinarian, or other clinician.

[0145] “Treating” or “treatment” of a disease, disorder, or syndrome, as used herein, includes (i) preventing the disease, disorder, or syndrome from occurring in a subject, i.e., causing the clinical symptoms of the disease, disorder, or syndrome not to develop in an animal that may be exposed to or predisposed to the disease, disorder, or syndrome but does not yet experience or display symptoms of the disease, disorder, or syndrome; (ii) inhibiting the disease, disorder, or syndrome, i.e., arresting its development; and (iii) relieving the disease, disorder, or syndrome, i.e., causing regression of the disease, disorder, or syndrome. As such, the terms “treating,” “treat” and “treatment” encompass preventative (e.g., prophylactic), as well as palliative treatment. As is known in the art, adjustments for systemic versus localized delivery, age, body weight, general health, sex, diet, time of administration, drug interaction and the severity of the condition may be necessary, and will be ascertainable by one of ordinary skill in the art.

[0146] “Modulate,” “attenuate” or “ameliorate” means any treatment of a disease or disorder in a subject, such as a mammal, including: preventing or protecting against the disease or disorder, e.g., causing the abnormal biological reaction or symptoms not to develop; inhibiting the disease or disorder, arresting or suppressing the development of abnormal biological reactions and/or clinical symptoms; and/or relieving the disease or disorder, e.g., causing the regression of abnormal biological reactions and/or symptoms.

[0147] “Preventing” or “inhibiting” refers to the prophylactic treatment of a subject in need thereof. The prophylactic treatment can be accomplished by providing an appropriate dose of a therapeutic agent to a subject at risk of suffering from an ailment, thereby substantially averting onset of the ailment.

[0148] “Subject” encompasses mammals such as humans, non-human primates, livestock, companion animals, and laboratory animals (e.g., rodents and lagamorphs). It is intended that the term encompass females as well as males. In some embodiments, a “patient” means any subject that is being assessed for, treated for, or is experiencing disease.

[0149] “Infant” refers to a child in the period of the first month after birth to approximately one (1) year of age. As used herein, the term “newborn” refers to child in the period from birth to the 28th day of life.

[0150] “Child” refers to a person who has not attained the legal age for consent to treatment or research procedures. In some embodiments, the term refers to a person between the time of birth and adolescence.

[0151] In some embodiments, “child” can be further subdivided into children older than 12 months and younger than 4 years, and children 4 years and older up to 18 years of age.

[0152] “Adult” refers to a person who has attained legal age for the relevant jurisdiction (e.g., 18 years of age in the United States). In some embodiments, the term refers to any fully grown, mature organism.

### Engineered Protease Polypeptides

[0153] The engineered protease polypeptides described herein is based on the naturally occurring protease of Bacillus sinesaloumensis Marseille P3516. The naturally occurring protease is composed of a pro-region, a protease domain, and a Big-1 domain (see FIG. 1 and SEQ ID NO: 2). The Big-1 domain is a region of about 95 amino acids present in bacterial adhesion molecules of the intimin/invasin family. In the amino acid sequence of SEQ ID NO: 2, the Big-1 domain is within amino acid residues about 440 to 522. The present disclosure shows that protease activity is maintained in engineered proteases deleted of the Big-1 domain, as well as deletion of a peptide region linking the Big-1 domain to the protease domain. Deletion of the carboxy terminal region up to and including amino acid residue 426, or up to and including amino acid residue 414 maintains the protease activity.

[0154] Furthermore, the pro-polypeptide or pro-enzyme form of the naturally occurring protease can transform into or covert to an active protease. Without being bound by any theory of operation, the pro-domain appears to promote formation of the active protease, which is formed by cleavage of the pro-polypeptide. For the pro-polypeptide of SEQ ID NO: 4 (see FIG. 2), the cleavage can occur between amino acid residues 127/128 and/or 134/135 to form the proteolytically active polypeptide or active protease. This cleavage can occur through auto-proteolysis, a self catalyzed reaction that occurs under suitable activation conditions. In some instances, the proteolytically active polypeptide may be formed by action of another protease, including the active protease forms of the engineered protease polypeptide described herein.

[0155] In one aspect, the present disclosure provides engineered protease polypeptides, with or without the Big-1 domain, as well as engineered protease polypeptides having one or more amino acid deletions of the peptide region linking the Big-1 domain to the protease domain. In some embodiments, the engineered protease polypeptides include the pro-polypeptide and corresponding proteolytically active polypeptide form, e.g., an active protease or the mature form of the protease.

[0156] In some embodiments, the present disclosure provides engineered protease polypeptides which exhibit an improved property, including, among others, enhanced expression, increased proteolytic activity of the active protease, increased thermostability, increased resistance against gastric proteases, increased activity at acidic pH, and/or increased stability at acidic pH.

[0157] In some embodiments, an engineered protease polypeptide, or a biologically active fragment thereof, comprises an amino acid sequence having at least 70%, 75%, 80%, 81%, 82%, 83%, 84%, 85%, 86%, 87%, 88%, 89%, 90%, 91%, 92%, 93%, 94%, 95%, 96%, 97%, 98%, or 99%, or more sequence identity to a reference sequence corresponding to residues 135-413 of SEQ ID NO: 4, 628, 948, 1126, 1368, or 1548, or to a reference sequence corresponding to SEQ ID NO: 4, 628, 948, 1126, 1368, or 1548, wherein the amino acid sequence comprises one or more substitutions relative to the reference sequence corresponding to residues 135-413 of SEQ ID NO: 4, 628, 948, 1126, 1368, or 1548, or relative to the reference sequence corresponding to SEQ ID NO: 4, 628, 948, 1126, 1368, or 1548.

[0158] In some embodiments, the engineered protease polypeptide, or a biologically active fragment thereof, comprises an amino acid sequence having at least 70%, 75%, 80%, 81%, 82%, 83%, 84%, 85%, 86%, 87%, 88%, 89%, 90%, 91%, 92%, 93%, 94%, 95%, 96%, 97%, 98%, or 99%, or more sequence identity to the reference sequence corresponding to residues 135-413 of SEQ ID NO: 4 or 628, or to the reference sequence corresponding to SEQ ID NO: 4 or 628, wherein the amino acid sequence comprises one or more substitutions relative to the reference sequence corresponding to residues 135-413 of SEQ ID NO: 4 or 628, or relative to the reference sequence corresponding to SEQ ID NO: 4 or 628.

[0159] In some embodiments, the engineered protease polypeptide, or a biologically active fragment thereof, comprises an amino acid sequence having at least 70%, 75%, 80%, 81%, 82%, 83%, 84%, 85%, 86%, 87%, 88%, 89%, 90%, 91%, 92%, 93%, 94%, 95%, 96%, 97%, 98%, or 99%, or more sequence identity to the reference sequence corresponding to residues 135-413 of SEQ ID NO: 948, 1126, 1368, or 1548, or to the reference sequence corresponding to SEQ ID NO: 948, 1126, 1368, or 1548, wherein the amino acid sequence comprises one or more substitutions relative to the reference sequence corresponding to residues 135-413 of SEQ ID NO: 4 or 628, or relative to the reference sequence corresponding to SEQ ID NO: 4 or 628.

[0160] In some embodiments, the engineered protease polypeptide, or a biologically active fragment thereof, of comprises an amino acid sequence having at least 70%, 75%, 80%, 81%, 82%, 83%, 84%, 85%, 86%, 87%, 88%, 89%, 90%, 91%, 92%, 93%, 94%, 95%, 96%, 97%, 98%, or 99%, or more sequence identity to a reference sequence corresponding to residues 135-413 of an even-numbered SEQ ID NO. of SEQ ID NOs: 6-2242, or to a reference sequence corresponding to an even-numbered SEQ ID NO. of SEQ ID NOs: 6-2242, wherein the amino acid sequence comprises one or more substitutions relative to the reference sequence corresponding to residues 135-413 of SEQ ID NO: 4 or 628, or relative to the reference sequence corresponding to SEQ ID NO: 4 or 628.

[0161] In some embodiments, the amino acid sequence of the engineered protease polypeptide comprises at least a substitution at amino acid position 11, 31, 42, 45, 50, 53, 84, 99, 100, 126, 128, 129, 130, 131, 132, 134, 135, 136, 137, 138, 139, 140, 141, 143, 145, 151, 154, 156, 157, 159, 160, 161, 162, 163, 169, 172, 173, 174, 179, 180, 184, 185, 186, 187, 188, 190, 191, 192, 193, 194, 198, 199, 212, 214, 220, 221, 222, 223, 225, 231, 232, 233, 235, 237, 238, 239, 240, 242, 243, 245, 246, 249, 250, 251, 252, 253, 254, 256, 258, 262, 263, 264, 265, 266, 267, 268, 269, 271, 273, 274, 275, 277, 278, 279, 280, 281, 283, 285, 290, 292, 293, 294, 296, 297, 300, 302, 303, 311, 312, 313, 314, 315, 316, 318, 324, 328, 336, 339, 341, 342, 343, 345, 346, 355, 358, 360, 364, 367, 368, 369, 370, 371, 372, 373, 374, 375, 377, 381, 382, 384, 386, 389, 391, 392, 401, 402, 405, 406, 409, 410, 411, 412, or 413, or combinations thereof, wherein the amino acid positions are relative to the reference sequence corresponding to residues 135-413 of SEQ ID NO: 4 or 628, or relative to the reference sequence corresponding to SEQ ID NO: 4 or 628.

[0162] In some embodiments, the amino acid sequence of the engineered protease polypeptide comprises at least a substitution or amino acid residue 11K, 31G, 42W, 45Y, 50R, 53A, 84M, 99V, 100V, 126T, 128G/I/K/L/P/R/S/T/V, 129E/F/H/I/K/L/R/S/T/V, 130A/F/G/N/V, 131E/P/R/T/V/Y, 132A/C/D/E/G/P/R/V/Y, 134A/C/D/E/G/I/L/M/N/P/S/T/V/W/Y, 135C/E/G/H/I/K/L/M/N/P/R/S/T/V/W/Y, 136C/G/I/M, 137A/D/N/S, 138Q, 139C/D/E/F/H/I/K/L/M/R/S, 140L, 141A/C/D/E/F/G/H/I/L/M/Q/R/S/T/V/W/Y, 143A/C/D/N/Q/S/T, 145A/C/D/E/F/G/H/I/K/L/P/Q/R/S/T/V/W, 151D/Q, 154C/D/L/R, 156C/V, 157A/C/D/E/F/G/H/I/K/L/M/N/P/Q/R/T/V/W, 159G, 160A/C/D/E/F/K/L/M/N/P/R/Q/T/V/W/Y, 161D/E/G/L/R, 162I, 163H/L, 169S, 172Q, 173F/S, 174L, 179K/S, 180H/L/M, 184A/D/G/L/M/Q/R, 185A/D/E/F/G/L/M/P/Q/R/S/T/V, 186A/R/S/T/Y, 187A, 188A/C/D/F/G/L/M/S/T/W, 190S, 191R, 192C/D/M/N, 193T, 194A/D/L/T, 198G, 199C/K/L, 212S, 214A/C/D/E/F/G/H/I/K/L/M/N/P/Q/R/T/V/W/Y, 220K/L/R, 221A/C/D/E/F/G/H/I/K/L/M/P/Q/R/T/V/W/Y, 222G, 223S, 225V, 231H/V, 232S, 233G/I/L, 235Q/R/V, 237A/G, 238Q, 239L/M, 240A/L, 242E/S, 243E/L/M/R/S/T, 245L/V, 246I/V, 249G/M/S, 250A/C/F/L/N/T, 251D/S, 252P, 253C/I/V, 254C/E, 256L/M, 258W, 262A/S, 263E/H/P/Q/R/S, 264A/C/F/I/L/N/P/R/T/V, 265C/G/R, 266H/T/Y, 267A/G/H/I/L/M/R/S/T/V/W, 268A/F/G/H/I/N/P/Q/T/V/Y, 269Q/T, 271A, 273A/C/F/L/M/S/T, 274A/G/K/L/T/V/W, 275A/V, 277D/G, 278L/N/S/V/Y, 279A/E/F/G/H/K/L/M/R/S/T/Y/V/W, 280D/K/S/T, 281C/V, 283M, 285S, 290E/G/S, 292V, 293A, 294V/W, 296M/R, 297F, 300R/V, 302G/P, 303A/V, 311A/E/D/G/K/M/Q/S, 312A/C/D/E/G/H/I/K/L/M/N/P/Q/R/T/V/W/Y, 313A/Q/S/T, 314G, 315A/C/D/E/F/G/H/I/K/L/M/Q/R/S/V/W/Y, 316K, 318N/P/R, 324A/D/E/I/R/V/W/Y, 328L/M, 336F, 339S/W, 341G, 342A/C/D/E/F/G/I/K/M/N/P/R/Q/T/V/W/Y, 343S, 345A/C/D/E/F/G/I/K/L/M/Q/R/S/V/W/Y, 346A/C/D/F/G/K/L/M/N/P/Q/R/T/V/W/Y, 355A, 358S, 360S, 364A/V, 367V, 368G/T, 369I/V/W, 370C/E/F/G/I/K/L/P/Q/R/S/V, 371L, 372A/C/F/L/R/V/Y, 373A/C/E/F/M/S/Y, 374E/G/L/R/S/W/Y, 375A/E/I/L/M/S/T/V, 377H, 381N, 382G/R/S/T, 384C, 386P/W, 389C/P, 391L/S, 392Y, 401L, 402G/*, 405L/Q, 406C/M/R/W, 409E/R/*, 410C/I/W/*, 411L/R/T/V, 412P/T/*, or 413A/C/D/S/*, or combinations thereof, wherein the amino acid positions are relative to the reference sequence corresponding to residues 135-413 of SEQ ID NO: 4 or 628, or relative to the reference sequence corresponding to SEQ ID NO: 4 or 628.

[0163] In some embodiments, the amino acid sequence of the engineered protease polypeptide comprises at least a substitution N11K, D31G, G42W, D45Y, K50R, T53A, V84M, I99V, A100V, A126T, E128G/I/K/L/P/R/S/T/V, G129E/F/H/I/K/L/R/S/T/V, R130A/F/G/N/V, A131E/P/R/T/V/Y, T132A/C/D/E/G/P/R/V/Y, Q134A/C/D/E/G/I/L/M/N/P/S/T/V/W/Y, A135C/E/G/H/I/K/L/M/N/P/R/S/T/V/W/Y, V136C/G/I/M, H137A/D/N/S, P138Q, N139C/D/E/F/H/I/K/L/M/R/S, Q140L, N141A/C/D/E/F/G/H/I/L/M/Q/R/S/T/V/W/Y, H143A/C/D/N/Q/S/T, N145A/C/D/E/F/G/H/I/K/L/P/Q/R/S/T/V/W, E151D/Q, A154C/D/L/R, T156C/V, S157A/C/D/E/F/G/H/I/K/L/M/N/P/Q/R/T/V/W, S159G, S160A/C/D/E/F/K/L/M/N/P/R/Q/T/V/W/Y, S161D/E/G/L/R, V162I, K163H/L, T169S, D172Q, H173F/S, N174L, A179K/S, N180H/L/M, T184A/D/G/L/M/Q/R, N185A/D/E/F/G/L/M/P/Q/R/S/T/V, L186A/R/S/T/Y, G187A, R188A/C/D/F/G/L/M/S/T/W, F190S, V191R, G192C/D/M/N, G193T, N194A/D/L/T, V198G, Q199C/K/L, Y212S, S214A/C/D/E/F/G/H/I/K/L/M/N/P/Q/R/T/V/W/Y, Q220K/L/R, S221A/C/D/E/F/G/H/I/K/L/M/P/Q/R/T/V/W/Y, A222G, T223S, I225V, D231H/V, N232S, S233G/I/L, S235Q/R/V, S237A/G, L238Q, Y239L/M, G240A/L, T242E/S, Q243E/L/M/R/S/T, 1245L/V, L246I/V, A249G/M/S, D250A/C/F/L/N/T, T251D/S, D252P, A253C/I/V, D254C/E, 1256L/M, M258W, G262A/S, G263E/H/P/Q/R/S, G264A/C/F/I/L/N/P/R/T/V, Y265C/G/R, N266H/T/Y, Q267A/G/H/I/L/M/R/S/T/V/W, S268A/F/G/H/I/N/P/Q/T/V/Y, M269Q/T, E271A, V273A/C/F/L/M/S/T, Q274A/G/K/L/T/V/W, T275A/V, V277D/G, A278L/N/S/V/Y, Q279A/E/F/G/H/K/L/M/R/S/T/Y/V/W, G280D/K/S/T, T281C/V, V283M, A285S, D290E/G/S, A292V, S293A, S294V/W, S296M/R, Y297F, A300R/V, S302G/P, S303A/V, T311A/E/D/G/K/M/Q/S, S312A/C/D/E/G/H/I/K/L/M/N/P/Q/R/T/V/W/Y, N313A/Q/S/T, R314G, T315A/C/D/E/F/G/H/I/K/L/M/Q/R/S/V/W/Y, R316K, S318N/P/R, S324A/D/E/I/R/V/W/Y, V328L/M, Y336F, Y339S/W, N341G, S342A/C/D/E/F/G/I/K/M/N/P/R/Q/T/V/W/Y, R343S, T345A/C/D/E/F/G/I/K/L/M/Q/R/S/V/W/Y, S346A/C/D/F/G/K/L/M/N/P/Q/R/T/V/W/Y, P355A, A358S, V360S, 1364A/V, A367V, N368G/T, P369I/V/W, 370C/E/F/G/I/K/L/P/Q/R/S/V, I371L, S372A/C/F/L/R/V/Y, V373A/C/E/F/M/S/Y, A374E/G/L/R/S/W/Y, Q375A/E/I/L/M/S/T/V, R377H, R381N, D382G/R/S/T, A384C, E386P/W, S389C/P, T391L/S, Q392Y, H401L, A402G/*, V405L/Q, A406C/M/R/W, G409E/R/*, G410C/I/W/*, S411L/R/T/V, G412P/T/*, or G413A/C/D/S/*, or combinations thereof, wherein the amino acid positions are relative to the reference sequence corresponding to residues 135-413 of SEQ ID NO: 4 or 628, or relative to the reference sequence corresponding to SEQ ID NO: 4 or 628.

[0164] In some embodiments, the amino acid sequence of the engineered protease polypeptide comprises at least a substitution at amino acid position 135, 137, 139, 141, 143, 157, 160, 214, 268, 273, 279, 311, 312, 315, 328, 342, 345, 346, or 372, or combinations thereof, wherein the amino acid positions are relative to the reference sequence corresponding to residues 135-413 of SEQ ID NO: 4 or 628, or relative to the reference sequence corresponding to SEQ ID NO: 4 or 628.

[0165] In some embodiments, the amino acid sequence of the engineered protease polypeptide comprises at least a substitution or amino acid residue 135C/E/G/H/I/K/L/M/N/P/R/S/T/V/W/Y, 137A/D/N/S, 139C/D/E/F/H/I/K/L/M/R/S, 141A/C/D/E/F/G/H/I/L/M/Q/R/S/T/V/W/Y, 143A/C/D/N/Q/S/T, 157A/C/D/E/F/G/H/I/K/L/M/N/P/Q/R/T/V/W, 160A/C/D/E/F/K/L/M/N/P/R/Q/T/V/W/Y, 214A/C/D/E/F/G/H/I/K/L/M/N/P/Q/R/T/V/W/Y, 268A/F/G/H/I/N/P/Q/T/V/Y, 273A/C/F/L/M/S/T, 279A/E/F/G/H/K/L/M/R/S/T/Y/V/W, 311A/E/D/G/K/M/Q/S, 312A/C/D/E/G/H/I/K/L/M/N/P/Q/R/T/V/W/Y, 315A/C/D/E/F/G/H/I/K/L/M/Q/R/S/V/W/Y, 328L/M, 342A/C/D/E/F/G/I/K/M/N/P/R/Q/T/V/W/Y, 345A/C/D/E/F/G/I/K/L/M/Q/R/S/V/W/Y, 346A/C/D/F/G/K/L/M/N/P/Q/R/T/V/W/Y, or 372A/C/F/L/R/V/Y, or combinations thereof, wherein the amino acid positions are relative to the reference sequence corresponding to residues 135-413 of SEQ ID NO: 4 or 628, or relative to the reference sequence corresponding to SEQ ID NO: 4 or 628.

[0166] In some embodiments, the amino acid sequence of the engineered protease polypeptide comprises at least a substitution A135C/E/G/H/I/K/L/M/N/P/R/S/T/V/W/Y, H137A/D/N/S, N139C/D/E/F/H/I/K/L/M/R/S, N141A/C/D/E/F/G/H/I/L/M/Q/R/S/T/V/W/Y, H143A/C/D/N/Q/S/T, S157A/C/D/E/F/G/H/I/K/L/M/N/P/Q/R/T/V/W, S160A/C/D/E/F/K/L/M/N/P/R/Q/T/V/W/Y, S214A/C/D/E/F/G/H/I/K/L/M/N/P/Q/R/T/V/W/Y, S268A/F/G/H/I/N/P/Q/T/V/Y, V273A/C/F/L/M/S/T, Q279A/E/F/G/H/K/L/M/R/S/T/Y/V/W, T311A/E/D/G/K/M/Q/S, S312A/C/D/E/G/H/I/K/L/M/N/P/Q/R/T/V/W/Y, T315A/C/D/E/F/G/H/I/K/L/M/Q/R/S/V/W/Y, V328L/M, S342A/C/D/E/F/G/I/K/M/N/P/R/Q/T/V/W/Y, T345A/C/D/E/F/G/I/K/L/M/Q/R/S/V/W/Y, S346A/C/D/F/G/K/L/M/N/P/Q/R/T/V/W/Y, or S372A/C/F/L/R/V/Y, or combinations thereof, wherein the amino acid positions are relative to the reference sequence corresponding to residues 135-413 of SEQ ID NO: 4 or 628, or relative to the reference sequence corresponding to SEQ ID NO: 4 or 628.

[0167] In some embodiments, the amino acid sequence of the engineered protease polypeptide comprises at least a substitution set at amino acid positions 135/141/160/311/315/372, 143/328/342/345, 139/157/268/273/312/346, or 137/139/214/279, wherein the amino acid positions are relative to the reference sequence corresponding to residues 135-413 of SEQ ID NO: 4 or 628, or relative to the reference sequence corresponding to SEQ ID NO: 4 or 628.

[0168] In some embodiments, the amino acid sequence of the engineered protease polypeptide comprises at least a substitution set or amino acid residues 135G/141V/160L/311D/315V/372V, 143A/328L/342G/345R, 139C/157G/268G/273T/312Q/346T, or 137N/139L/214P/279M, wherein the amino acid positions are relative to the reference sequence corresponding to residues 135-413 of SEQ ID NO: 4 or 628, or relative to the reference sequence corresponding to SEQ ID NO: 4 or 628.

[0169] In some embodiments, the amino acid sequence of the engineered protease polypeptide comprises at least a substitution set A135G/N141V/S160L/T311D/T315V/S372V, H143A/V328L/S342G/T345R, N139C/S157G/S268G/V273T/S312Q/S346T, or H137N/C139L/S214P/Q279M, wherein the amino acid positions are relative to the reference sequence corresponding to residues 135-413 of SEQ ID NO: 4 or 628, or relative to the reference sequence corresponding to SEQ ID NO: 4 or 628.

[0170] In some embodiments, the amino acid sequence of the engineered protease polypeptide comprises at least a substitution or substitution set at amino acid position(s) 185, 134, 129, 135, 184, 132, 186, 193, 263, 370, 45/134, 199, 368, 161, 141, 267, 179, 264, 160, 138, 131, 372, 151, 274, 128, 339, 313, 374, 314, 191, 324, 315, 375, 136, 220, 194, 231, 277, 369, 251, 180, 163, 343, 264/279, 279, 232, 141/300, 367, 266, 188, 130, 318, 265, 341, 190, 145, 126/192, 11/220, 192, 370/392, 99/278, 265/311, 84/159/265/279/311/370, 311/316, 342/370, 265/311/370, 192/311/316, 141/154/192, 265/311/316/342, 279/311/316, 141/265/279/311/342, 141/192/311/316/370, 141/265/311, 198/279, 392, 342/370/392, 141/198/265, 265/392, 184/267, 342, 312, 100/251, 141/220, 311/316/370, 99, 278, 405, 311/342/370, 141/198, 311/342, 141/311, 279/311/377/392, 186/198/311/342/370/392, 141/392, 311/370/392, 141/311/392, 311/370, 311/316/392, 265/311/392, 141/192, 311, 141/265/311/392, 192/311/370/392, 198/265/311/316/370, 141/186/265/311, or 141/198/265/311/370, wherein the amino acid positions are relative to the reference sequence corresponding to residues 135-413 of SEQ ID NO: 4 or 628, or relative to the reference sequence corresponding to SEQ ID NO: 4 or 628.

[0171] In some embodiments, the amino acid sequence of the engineered protease polypeptide comprises at least a substitution or substitution set, or amino acid residue(s) 185F, 134I, 129T, 135C, 184A, 129R, 132Y, 186R, 193T, 263P, 370C, 45Y/Q134W, 185M, 199K, 368T, 161E, 141T, 267L, 179S, 185V, 264L, 199C, 160M, 138Q, 131Y, 184D, 372R, 134L, 370R, 370I, 134E, 368G, 151D, 274K, 134D, 134V, 128I, 339S, 313A, 131E, 185P, 374W, 314G, 191R, 128V, 132E, 324R, 315M, 132V, 375L, 375T, 129L, 132P, 184M, 136G, 186A, 135S, 220L, 134P, 132A, 141M, 135I, 194D, 185Q, 263H, 274L, 231V, 315R, 375S, 135T, 185G, 135R, 277D, 128P, 132R, 369I, 264C, 315H, 251S, 136I, 160P, 3751, 180M, 369V, 251D, 264A, 163L, 231H, 343S, 264R/279R, 274A, 279Y, 131P, 232S, 220R, 315Q, 186T, 324V, 313S, 132D, 141R/300V, 324I, 367V, 135V, 370L, 132G, 267G, 131T, 266T, 179K, 372A, 372F, 185T, 324D, 135K, 188A, 141D, 374L, 185D, 130N, 370V, 161R, 3151, 315L, 318N, 188C, 180L, 372Y, 135P, 375E, 324A, 129K, 134M, 184G, 185A, 129H, 188D, 130F, 265C, 141W, 324W, 370E, 184R, 134A, 161L, 134T, 370G, 375A, 128G, 130V, 134N, 341G, 190S, 370P, 145R, 279H, 279S, 160Q, 370K, 126T/G192C, 374E, 128K, 160C, 186S, 11K/Q220K, 134W, 129V, 128L, 151Q, 375M, 134C, 374R, 160T, 279T, 264F, 132C, 129F, 264V, 1291, 184Q, 192M, 374S, 370F, 267A, 369W, 199L, 145M, 194A, 185S, 265R, 129S, 185R, 188W, 161G, 370G/392Y, 99V/278N, 265G/311D, 84M/159G/265G/279K/311D/370G, 311D/316K, 342N/370G, 265G/311D/370G, 192D/311D/316K, 141Q/154D/192D, 265G/311D/316K/342N, 279K/311D/316K, 141Q/265G/279K/311D/342N, 141Q/192D/311D/316K/370G, 141Q, 141Q/265G/311D, 198G/279K, 392Y, 342N/370G/392Y, 141Q/198G/265G, 265G/392Y, or 265G, wherein the amino acid positions are relative to the reference sequence corresponding to residues 135-413 of SEQ ID NO: 4 or 628, or relative to the reference sequence corresponding to SEQ ID NO: 4 or 628.

[0172] In some embodiments, the amino acid sequence of the engineered protease polypeptide comprises at least a substitution or substitution set N185F, Q134I, G129T, A135C, T184A, G129R, T132Y, L186R, G193T, G263P, D370C, D45Y/Q134W, N185M, Q199K, N368T, S161E, N141T, Q267L, A179S, N185V, G264L, Q199C, S160M, P138Q, A131Y, T184D, S372R, Q134L, D370R, D370I, Q134E, N368G, E151D, Q274K, Q134D, Q134V, E128I, Y339S, N313A, A131E, N185P, A374W, R314G, V191R, E128V, T132E, S324R, T315M, T132V, Q375L, Q375T, G129L, T132P, T184M, V136G, L186A, A135S, Q220L, Q134P, T132A, N141M, A135I, N194D, N185Q, G263H, Q274L, D231V, T315R, Q375S, A135T, N185G, A135R, V277D, E128P, T132R, P369I, G264C, T315H, 1251S, V136I, S160P, Q3751, N180M, P369V, 1251D, G264A, K163L, D231H, R343S, G264R/Q279R, Q274A, Q279Y, A131P, N232S, Q220R, T315Q, L186T, S324V, N313S, T132D, N141R/A300V, S324I, A367V, A135V, D370L, T132G, Q267G, A131T, N266T, A179K, S372A, S372F, N185T, S324D, A135K, R188A, N141D, A374L, N185D, T130N, D370V, S161R, T3151, T315L, S318N, R188C, N180L, S372Y, A135P, Q375E, S324A, G129K, Q134M, T184G, N185A, G129H, R188D, T130F, Y265C, N141W, S324W, D370E, T184R, Q134A, S161L, Q134T, D370G, Q375A, E128G, T130V, Q134N, N341G, F190S, D370P, N145R, Q279H, Q279S, S160Q, D370K, A126T/G192C, A374E, E128K, S160C, L186S, N11K/Q220K, Q134W, G129V, E128L, E151Q, Q375M, Q134C, A374R, S160T, Q279T, G264F, T132C, G129F, G264V, G1291, T184Q, G192M, A374S, D370F, Q267A, P369W, Q199L, N145M, N194A, N185S, Y265R, G129S, N185R, R188W, S161G, D370G/Q392Y, 199V/A278N, Y265G/T311D, V84M/S159G/Y265G/Q279K/T311D/D370G, T311D/R316K, S342N/D370G, Y265G/T311D/D370G, G192D/T311D/R316K, N141Q/A154D/G192D, Y265G/T311D/R316K/S342N, Q279K/T311D/R316K, N141Q/Y265G/Q279K/T311D/S342N, N141Q/G192D/T311D/R316K/D370G, N141Q, N141Q/Y265G/T311D, V198G/Q279K, Q392Y, S342N/D370G/Q392Y, N141Q/V198G/Y265G, Y265G/Q392Y, or Y265G, wherein the amino acid positions are relative to the reference sequence corresponding to residues 135-413 of SEQ ID NO: 4 or 628, or relative to the reference sequence corresponding to SEQ ID NO: 4 or 628.

[0173] In some embodiments, the amino acid sequence of the engineered protease polypeptide comprises at least a substitution or substitution set, or amino acid residue(s) 135L, 194L, 128T, 134S, 313T, 184L/267L, 185E, 342G, 374Y, 141R, 186Y, 312R, 313Q, 315V, 374G, 128S, 136A, 128R, 370Q, 267V, 188M, 188F, 263S, 188S, 339W, 100V/251S, 131V, 188T, 141L, 134Y, 267M, 264N, 134G, 185L, 370S, 267W, 279M, 267R, 264T, 279L, 263R, 136C, 145E, 188G, 130A, 192N, 188L, 312I, 129E, 315E, 145A, 267H, 372V, 130G, 267T, 274W, 136M, 372C, 194T, 375V, 135G, 267I, 141L/220R, 324E, 160L, 141S, 372L, 135Y, 141V, 141A, 131R, 135E, 324Y, 311D/316K/370G, 99V, 278N, 405Q, 311D/342N/370G, 141Q/198G, 311D/342N, 141Q/311D, 279K/311D/377H/392Y, 186Y/198G/311D/342N/370G/392Y, 141Q/392Y, 311D/370G/392Y, 141Q/311D/392Y, 311D/370G, 311D/316K/392Y, 265G/311D/392Y, 141Q/192D, 311D, 141Q/265G/311D/392Y, 192D/311D/370G/392Y, 198G/265G/311D/316K/370G, 141Q/186Y/265G/311D, or 141Q/198G/265G/311D/370G, wherein the amino acid positions are relative to the reference sequence corresponding to residues 135-413 of SEQ ID NO: 4 or 628, or relative to the reference sequence corresponding to SEQ ID NO: 4 or 628.

[0174] In some embodiments, the amino acid sequence of the engineered protease polypeptide comprises at least a substitution or substitution set A135L, N194L, E128T, Q134S, N313T, T184L/Q267L, N185E, S342G, A374Y, N141R, L186Y, S312R, N313Q, T315V, A374G, E128S, V136A, E128R, D370Q, Q267V, R188M, R188F, G263S, R188S, Y339W, A100V/I251S, A131V, R188T, N141L, Q134Y, Q267M, G264N, Q134G, N185L, D370S, Q267W, Q279M, Q267R, G264T, Q279L, G263R, V136C, N145E, R188G, T130A, G192N, R188L, S312I, G129E, T315E, N145A, Q267H, S372V, T130G, Q267T, Q274W, V136M, S372C, N194T, Q375V, A135G, Q267I, N141L/Q220R, S324E, S160L, N141S, S372L, A135Y, N141V, N141A, A131R, A135E, S324Y, T311D/R316K/D370G, I99V, A278N, V405Q, T311D/S342N/D370G, N141Q/V198G, T311D/S342N, N141Q/T311D, Q279K/T311D/R377H/Q392Y, L186Y/V198G/T311D/S342N/D370G/Q392Y, N141Q/Q392Y, T311D/D370G/Q392Y, N141Q/T311D/Q392Y, T311D/D370G, T311D/R316K/Q392Y, Y265G/T311D/Q392Y, N141Q/G192D, T311D, N141Q/Y265G/T311D/Q392Y, G192D/T311D/D370G/Q392Y, V198G/Y265G/T311D/R316K/D370G, N141Q/L186Y/Y265G/T311D, or N141Q/V198G/Y265G/T311D/D370G, wherein the amino acid positions are relative to the reference sequence corresponding to residues 135-413 of SEQ ID NO: 4 or 628, or relative to the reference sequence corresponding to SEQ ID NO: 4 or 628.

[0175] In some embodiments, the amino acid sequence of the engineered protease polypeptide comprises at least a substitution at amino acid position 135, 137, 139, 141, 143, 145, 145, 157, 160, 214, 221, 268, 273, 279, 311, 312, 315, 315, 342, 345, 346, 402, 409, 410, 412, or 413, or combinations thereof, wherein the amino acid positions are relative to the reference sequence corresponding to residues 135-413 of SEQ ID NO: 4 or 628, or relative to the reference sequence corresponding to SEQ ID NO: 4 or 628.

[0176] In some embodiments, the amino acid sequence of the engineered protease polypeptide comprises at least a substitution or amino acid residue 135G, 135S, 135V, 135L, 135R, 135E, 135P, 135H, 135C, 135T, 135Y, 135W, 135M, 135N, 137S, 137A, 137N, 137D, 139R, 139E, 139F, 139L, 139K, 139D, 139H, 139I, 139S, 141T, 141S, 141V, 141L, 141R, 141M, 141G, 141Y, 141I, 141C, 141F, 141A, 141D, 141E, 141H, 143T, 143C, 143Q, 143A, 143D, 143S, 143N, 145Q, 145T, 145V, 145H, 145L, 145E, 145R, 145D, 145R, 145A, 145F, 145S, 145G, 145I, 145K, 145M, 145C, 145W, 157A, 157E, 157P, 157V, 157T, 157N, 157R, 157G, 157L, 157W, 157K, 157C, 157D, 157Q, 157M, 157H, 157I, 157F, 160R, 160V, 160C, 160Q, 160A, 160P, 160L, 160F, 160T, 160D, 160Y, 160W, 160E, 160K, 160N, 160M, 214G, 214M, 214L, 214Q, 214T, 214P, 214R, 214D, 214F, 214K, 214A, 214V, 214I, 214E, 214H, 214Y, 214C, 214W, 221L, 221T, 221I, 221R, 221D, 221A, 221C, 221V, 221F, 221G, 221P, 221K, 221Y, 221E, 221Q, 221M, 221H, 221W, 268V, 268Y, 268A, 268Q, 268P, 268G, 268T, 268H, 268I, 268F, 268N, 273S, 273C, 273A, 273L, 273F, 273T, 273M, 279R, 279E, 279F, 279G, 279T, 279M, 279L, 279S, 279A, 279K, 279V, 279W, 279Y, 279H, 311S, 311D, 311Q, 311M, 311K, 311G, 311A, 311E, 312V, 312D, 312G, 312R, 312W, 312M, 312L, 312N, 312E, 312A, 312T, 312Y, 312P, 312H, 312Q, 312K, 312C, 312I, 315E, 315S, 315L, 315R, 315G, 315A, 315M, 315Y, 315K, 315Q, 315D, 315W, 315C, 315V, 3151, 315H, 315F, 342F, 342G, 342R, 342Q, 342E, 342V, 342T, 342C, 342N, 3421, 342P, 342M, 342A, 342W, 342K, 342D, 342Y, 345G, 345R, 345L, 345V, 345A, 345M, 345W, 345I, 345S, 345E, 345Y, 345D, 345Q, 345F, 345C, 345K, 346T, 346Q, 346V, 346R, 346P, 346L, 346D, 346W, 346G, 346A, 346C, 346M, 346F, 346N, 346Y, 346K, 402*, 409*, 410*, 412*, or 413*, or combinations thereof, wherein the amino acid positions are relative to the reference sequence corresponding to residues 135-413 of SEQ ID NO: 4 or 628, or relative to the reference sequence corresponding to SEQ ID NO: 4 or 628.

[0177] In some embodiments, the amino acid sequence of the engineered protease polypeptide comprises at least a substitution A135G, A135S, A135V, A135L, A135R, A135E, A135P, A135H, A135C, A135T, A135Y, A135W, A135M, A135N, H137S, H137A, H137N, H137D, N139R, N139E, N139F, N139L, N139K, N139D, N139H, N139I, N139S, N141T, N141S, N141V, N141L, N141R, N141M, N141G, N141Y, N141I, N141C, N141F, N141A, N141D, N141E, N141H, H143T, H143C, H143Q, H143A, H143D, H143S, H143N, N145Q, N145T, N145V, N145H, N145L, N145E, N145R, N145D, N145R, N145A, N145F, N145S, N145G, N145I, N145K, N145M, N145C, N145W, S157A, S157E, S157P, S157V, S157T, S157N, S157R, S157G, S157L, S157W, S157K, S157C, S157D, S157Q, S157M, S157H, S157I, S157F, S160R, S160V, S160C, S160Q, S160A, S160P, S160L, S160F, S160T, S160D, S160Y, S160W, S160E, S160K, S160N, S160M, S214G, S214M, S214L, S214Q, S214T, S214P, S214R, S214D, S214F, S214K, S214A, S214V, S214I, S214E, S214H, S214Y, S214C, S214W, S221L, S221T, S221I, S221R, S221D, S221A, S221C, S221V, S221F, S221G, S221P, S221K, S221Y, S221E, S221Q, S221M, S221H, S221W, S268V, S268Y, S268A, S268Q, S268P, S268G, S268T, S268H, S268I, S268F, S268N, V273S, V273C, V273A, V273L, V273F, V273T, V273M, Q279R, Q279E, Q279F, Q279G, Q279T, Q279M, Q279L, Q279S, Q279A, Q279K, Q279V, Q279W, Q279Y, Q279H, T311S, T311D, T311Q, T311M, T311K, T311G, T311A, T311E, S312V, S312D, S312G, S312R, S312W, S312M, S312L, S312N, S312E, S312A, S312T, S312Y, S312P, S312H, S312Q, S312K, S312C, S312I, T315E, T315S, T315L, T315R, T315G, T315A, T315M, T315Y, T315K, T315Q, T315D, T315W, T315C, T315V, T3151, T315H, T315F, S342F, S342G, S342R, S342Q, S342E, S342V, S342T, S342C, S342N, S3421, S342P, S342M, S342A, S342W, S342K, S342D, S342Y, T345G, T345R, T345L, T345V, T345A, T345M, T345W, T345I, T345S, T345E, T345Y, T345D, T345Q, T345F, T345C, T345K, S346T, S346Q, S346V, S346R, S346P, S346L, S346D, S346W, S346G, S346A, S346C, S346M, S346F, S346N, S346Y, S346K, A402*, G409*, G410*, G412*, or G413*, or combinations thereof, wherein the amino acid positions are relative to the reference sequence corresponding to residues 135-413 of SEQ ID NO: 4 or 628, or relative to the reference sequence corresponding to SEQ ID NO: 4 or 628.

[0178] In some embodiments, the amino acid sequence of the engineered protease polypeptide comprises at least a substitution or substitution set at amino acid position(s) 242, 157, 250, 373, 243, 336, 187, 240, 280, 271, 237, 386, 382, 328, 42, 391, 381, 275, 249, 239, 384, 139, 364, 346, 389, 254, 246, 345, 360, 303, 300, 269, 135/141/372, 311/315/372, 136/141/311, 141/188, 135/136, 135/141/315, 372, 135/141/160/267/372, 135/136/141/160/185/188/267/311/315, 160/185, 135/141/188/279/311, 135/136/141, 135/136/141/372, 135/141/160/185/267/279, 135/141/160/267, 141/188/311/372, 160/185/188/279/311, 136/141/279, 135/136/141/160/185/188, 141/372, 135/136/141/311, 185/311/315/372, 135/141/188, 136/185, 135/141, 135/136/141/279/315/372, 135/311/315, 141, 311/372, 188/311, 135/141/188/372, 141/160/279, 313/392, 342/392, 279/392, 128, 198/342, 313, 128/312, 50, 145/263, 313/342, 279/312, 312/392, 279/342, 128/342, 342, 263, 143, 262, 156, 169, 143/237, 136/160/185/267/311/372, 135/160/311/372, 135/141/311/315, 141/311/315, 136/141/160/185/188/311/315/372, 135/141/311/315/372, 135/141/160/185/311/315, 135/141/267/311/315/372, 135/136/141/160/311/315, 135/136/141/279, 135/141/267/279/311/315, 135/141/160, 135/141/160/311/315/372, 135/141/160/311/315, 135/136/141/188/311, 141/160/311, 135/141/160/279/311/315/372, 141/160/185/279/311/372, 135/136/141/160/315/372, 135/136/160/279/311/372, 128/279/312/342, 128/198/312/342, 263/342, 145/263/279/312/342/392, or 128/145/198/312/313/392, wherein the amino acid positions are relative to the reference sequence corresponding to residues 135-413 of SEQ ID NO: 4 or 628, or relative to the reference sequence corresponding to SEQ ID NO: 4 or 628.

[0179] In some embodiments, the amino acid sequence of the engineered protease polypeptide comprises at least a substitution or substitution set, or amino acid residue(s) 242E, 157V, 250N, 373F, 243R, 336F, 187A, 240A, 280K, 271A, 237G, 386W, 382G, 280S, 373Y, 328M, 157R, 157A, 42W, 243E, 382S, 391L, 381N, 243M, 275V, 157I, 373S, 157T, 280D, 249G, 239L, 384C, 139M, 240L, 243T, 250L, 250A, 382T, 364A, 346V, 373M, 389P, 373C, 382R, 373E, 254E, 246I, 250F, 280T, 373A, 139K, 345I, 360S, 275A, 249M, 364V, 303V, 300R, 239M, 269T, 135G/141Q/372L, 311D/315V/372L, 136M/141V/311D, 141V/188M, 135E/136M, 136M/141Q/311D, 135E/141V/315V, 372V, 135E/141V/160L/267I/372V, 135G/136M/141V/160L/185E/188M/267I/311D/315V, 135G/136M, 160L/185E, 135E/141V/188M/279M/311D, 135G/136M/141Q, 135G/136M/141Q/372L, 135G/141V/160L/185E/267I/279M, 135G/141V/160L/267I, 141Q/188M/311D/372V, 160L/185E/188M/279M/311D, 136M/141V/279M, 135G/136M/141V/160L/185E/188L, 141Q/372V, 135E/136M/141Q/311D, 185E/311D/315V/372V, 135G/141V/188M, 136M/185E, 135E/141Q, 135E/136M/141Q/279M/315V/372L, 135G/311D/315V, 141V, 135G/141V, 311D/372L, 188M/311D, 135E/141V/188L/372L, 141V/160L/279M, 313Q/392Y, 342G/392Y, 279L/392Y, 128T, 198G/342G, 313Q, 128T/312I, 50R, 145E/263S, 313Q/342G, 279L/312I, 312I/392Y, 279K/342G, 279K/392Y, 128T/342G, 342G, or 263S, wherein the amino acid positions are relative to the reference sequence corresponding to residues 135-413 of SEQ ID NO: 4 or 628, or relative to the reference sequence corresponding to SEQ ID NO: 4 or 628.

[0180] In some embodiments, the amino acid sequence of the engineered protease polypeptide comprises at least a substitution or substitution set T242E, S157V, D250N, V373F, Q243R, Y336F, G187A, G240A, G280K, E271A, S237G, E386W, D382G, G280S, V373Y, V328M, S157R, S157A, G42W, Q243E, D382S, T391L, R381N, Q243M, T275V, S157I, V373S, S157T, G280D, A249G, Y239L, A384C, N139M, G240L, Q243T, D250L, D250A, D382T, I364A, S346V, V373M, S389P, V373C, D382R, V373E, D254E, L246I, D250F, G280T, V373A, N139K, T345I, V360S, T275A, A249M, I364V, S303V, A300R, Y239M, M269T, A135G/N141Q/S372L, T311D/T315V/S372L, V136M/N141V/T311D, N141V/R188M, A135E/V136M, V136M/N141Q/T311D, A135E/N141V/T315V, S372V, A135E/N141V/S160L/Q267I/S372V, A135G/V136M/N141V/S160L/N185E/R188M/Q267I/T311D/T315V, A135G/V136M, S160L/N185E, A135E/N141V/R188M/Q279M/T311D, A135G/V136M/N141Q, A135G/V136M/N141Q/S372L, A135G/N141V/S160L/N185E/Q267I/Q279M, A135G/N141V/S160L/Q267I, N141Q/R188M/T311D/S372V, S160L/N185E/R188M/Q279M/T311D, V136M/N141V/Q279M, A135G/V136M/N141V/S160L/N185E/R188L, N141Q/S372V, A135E/V136M/N141Q/T311D, N185E/T311D/T315V/S372V, A135G/N141V/R188M, V136M/N185E, A135E/N141Q, A135E/V136M/N141Q/Q279M/T315V/S372L, A135G/T311D/T315V, N141V, A135G/N141V, T311D/S372L, R188M/T311D, A135E/N141V/R188L/S372L, N141V/S160L/Q279M, N313Q/Q392Y, S342G/Q392Y, Q279L/Q392Y, E128T, V198G/S342G, N313Q, E128T/S312I, K50R, N145E/G263S, N313Q/S342G, Q279L/S312I, S312I/Q392Y, Q279K/S342G, Q279K/Q392Y, E128T/S342G, S342G, or G263S, wherein the amino acid positions are relative to the reference sequence corresponding to residues 135-413 of SEQ ID NO: 4 or 628, or relative to the reference sequence corresponding to SEQ ID NO: 4 or 628.

[0181] In some embodiments, the amino acid sequence of the engineered protease polypeptide comprises at least a substitution or substitution set, or amino acid residue(s) 139C, 345R, 243L, 143A, 249S, 262S, 139R, 269Q, 328L, 157G, 156V, 242S, 139L, 262A, 169S, 346T, 143N/237A, 136M/160L/185E/267I/311D/372L, 135E/160L/311D/372L, 135G/141V/311D/315V, 141V/311D/315V, 136M/141V/160L/185E/188M/311D/315V/372V, 135G/141V/311D/315V/372L, 135G/141Q/160L/185E/311D/315V, 135G/141V/267I/311D/315V/372V, 135G/136M/141V/160L/311D/315V, 135G/136M/141V/279M, 135G/141Q/267I/279M/311D/315V, 135E/141V/311D/315V/372V, 135E/141Q/160L, 135G/141Q/311D/315V, 135G/141V/160L/311D/315V/372V, 135G/141V/160L/311D/315V, 135G/141Q/267I/311D/315V/372L, 135G/136M/141V/188M/311D, 141V/160L/311D, 135E/141V/160L/279M/311D/315V/372L, 141V/160L/185E/279M/311D/372V, 135E/141V/311D/315V, 135G/136M/141V/160L/315V/372V, 135E/141V/160L, 135E/136M/160L/279M/311D/372V, 128T/279K/312I/342G, 128T/198G/312I/342G, 263S/342G, 145E/263S/279L/312I/342G/392Y, or 128T/145E/198G/312I/313Q/392Y, wherein the amino acid positions are relative to the reference sequence corresponding to residues 135-413 of SEQ ID NO: 4 or 628, or relative to the reference sequence corresponding to SEQ ID NO: 4 or 628.

[0182] In some embodiments, the amino acid sequence of the engineered protease polypeptide comprises at least a substitution or substitution set N139C, T345R, Q243L, H143A, A249S, G262S, N139R, M269Q, V328L, S157G, T156V, T242S, N139L, G262A, T169S, S346T, H143N/S237A, V136M/S160L/N185E/Q267I/T311D/S372L, A135E/S160L/T311D/S372L, A135G/N141V/T311D/T315V, N141V/T311D/T315V, V136M/N141V/S160L/N185E/R188M/T311D/T315V/S372V, A135G/N141V/T311D/T315V/S372L, A135G/N141Q/S160L/N185E/T311D/T315V, A135G/N141V/Q267I/T311D/T315V/S372V, A135G/V136M/N141V/S160L/T311D/T315V, A135G/V136M/N141V/Q279M, A135G/N141Q/Q267I/Q279M/T311D/T315V, A135E/N141V/T311D/T315V/S372V, A135E/N141Q/S160L, A135G/N141Q/T311D/T315V, A135G/N141V/S160L/T311D/T315V/S372V, A135G/N141V/S160L/T311D/T315V, A135G/N141Q/Q267I/T311D/T315V/S372L, A135G/V136M/N141V/R188M/T311D, N141V/S160L/T311D, A135E/N141V/S160L/Q279M/T311D/T315V/S372L, N141V/S160L/N185E/Q279M/T311D/S372V, A135E/N141V/T311D/T315V, A135G/V136M/N141V/S160L/T315V/S372V, A135E/N141V/S160L, A135E/V136M/S160L/Q279M/T311D/S372V, E128T/Q279K/S312I/S342G, E128T/V198G/S312I/S342G, G263S/S342G, N145E/G263S/Q279L/S312I/S342G/Q392Y, or E128T/N145E/V198G/S312I/N313Q/Q392Y, wherein the amino acid positions are relative to the reference sequence corresponding to the reference sequence corresponding to residues 135-413 of SEQ ID NO: 4 or 628, or relative to the reference sequence corresponding to SEQ ID NO: 4 or 628.

[0183] In some embodiments, the amino acid sequence of the engineered protease polypeptide comprises at least a substitution set at amino acid position(s) 135/141/160/311/315/372/411, 135/141/160/311/315/372/402, 135/141/160/285/311/315/372, 135/141/160/245/311/315/372, 135/141/160/266/311/315/372, 135/141/160/311/315/355/372, 135/141/160/258/311/315/372, 135/141/160/222/311/315/372, 135/140/141/160/311/315/372, 135/141/160/268/311/315/372, 135/141/160/225/311/315/372, 135/141/160/283/311/315/372, 135/141/160/311/315/372/406, 135/141/160/311/315/372/410, 135/141/143/145/160/243/311/312/315/372, 135/139/141/143/145/157/160/311/312/315/372, 135/139/141/157/160/311/315/345/372, 135/139/141/160/269/311/315/372, 135/141/156/157/160/311/315/342/346/372, 135/139/141/143/160/311/315/372, 135/141/160/269/311/315/372, 135/139/141/160/243/311/315/328/372, 135/141/160/269/311/315/328/372, 135/141/143/145/160/169/311/315/372, 135/141/160/311/315/328/372, 135/141/143/145/160/262/311/315/372, 135/141/145/160/262/311/312/315/328/372, 135/139/141/156/157/160/311/315/372, 135/139/141/145/160/311/312/315/372, 135/141/160/311/312/315/372, 135/139/141/160/311/315/372, 135/139/141/160/311/312/315/372, 135/139/141/156/160/311/315/372, 135/139/141/143/145/160/243/311/315/372, 135/141/145/157/160/311/315/372, 135/141/145/160/311/315/346/372, 135/141/145/160/262/311/312/315/328/345/346/372, 135/141/145/160/262/311/315/372, 135/141/160/311/312/315/342/372, 135/141/143/160/243/311/315/372, 135/139/141/160/311/315/345/372, 135/141/160/311/315/342/372, 135/141/143/145/160/262/311/315/342/372, 135/139/141/143/160/169/311/315/372, 135/139/141/143/145/160/311/312/315/372, 135/141/160/169/311/315/372, 135/139/141/145/160/262/311/312/315/328/342/345/346/372, 135/139/141/160/311/315/328/372, 135/139/141/160/243/311/315/372, 135/139/141/143/160/311/315/328/372, 135/139/141/143/160/243/311/315/372, 135/139/141/145/160/311/315/372, 135/141/145/160/311/312/315/372, 135/141/145/160/169/311/315/372, 135/139/141/143/157/160/311/312/315/372, 84/135/139/143/141/160/311/315/372, 135/141/145/160/269/311/315/372, 135/141/143/145/157/160/269/311/312/315/328/372, 135/141/143/145/160/269/311/315/372, 135/141/157/160/311/315/372, 135/139/141/143/160/311/312/315/372, 135/141/160/256/311/315/372, 135/141/160/273/311/315/372, 135/141/160/311/315/372/409, 135/141/160/172/311/315/372, 135/141/160/311/315/372/401, 135/141/160/281/311/315/372, 135/141/160/253/311/315/372, 135/141/143/145/160/243/311/315/328/372, 135/141/145/160/311/315/372, 135/139/141/143/145/160/311/315/328/342/345/372, 135/141/143/160/311/315/328/342/345/372, 135/141/145/160/311/315/342/345/372, 135/141/143/160/311/315/372, 135/141/139/143/160/311/315/372, 135/139/141/145/160/311/315/328/342/345/372, 135/141/143/145/160/169/311/312/315/328/345/346/372, 135/141/143/160/243/311/315/328/342/345/346/372, 135/139/141/143/157/160/169/311/315/328/346/372, 135/143/141/145/156/160/311/312/315/328/372, 135/139/141/145/157/160/311/312/315/328/372, 135/141/143/160/311/315/328/342/345/346/372, 135/141/143/145/160/311/315/372, 135/141/143/145/160/311/312/315/342/345/372, or 135/141/143/145/160/311/315/328/372, wherein the amino acid positions are relative to the reference sequence corresponding to residues 135-413 of SEQ ID NO: 4 or 628, or relative to the reference sequence corresponding to SEQ ID NO: 4 or 628.

[0184] In some embodiments, the amino acid sequence of the engineered protease polypeptide comprises at least a substitution set or amino acid residues 135G/141V/160L/311D/315V/372V/S411V, 135G/141V/160L/311D/315V/372V/411R, 135G/141V/160L/311D/315V/372V/402G, 135G/141V/160L/285S/311D/315V/372V, 135G/141V/160L/245V/311D/315V/372V, 135G/141V/160L/266H/311D/315V/372V, 135G/141V/160L/311D/315V/355A/372V, 135G/141V/160L/258W/311D/315V/372V, 135G/141V/160L/222G/311D/315V/372V, 135G/140L/141V/160L/311D/315V/372V, 135G/141V/160L/268T/311D/315V/372V, 135G/141V/160L/311D/315V/372V/411L, 135G/141V/160L/225V/311D/315V/372V, 135G/141V/160L/245L/311D/315V/372V, 135G/141V/160L/283M/311D/315V/372V, 135G/141V/160L/311D/315V/372V/406W, 135G/141V/160L/311D/315V/372V/410C, 135G/141V/160L/311D/315V/372V/406C, 135G/141V/143A/145E/160L/243L/311D/312I/315V/372V, 135G/139L/141V/143A/145E/157G/160L/311D/312I/315V/372V, 135G/139C/141V/157G/160L/311D/315V/345R/372V, 135G/139C/141V/160L/269Q/311D/315V/372V, 135G/141V/156V/157G/160L/311D/315V/342G/346T/372V, 135G/139L/141V/143A/160L/311D/315V/372V, 135G/141V/160L/269Q/311D/315V/372V, 135G/139L/141V/160L/243L/311D/315V/328L/372V, 135G/141V/160L/269Q/311D/315V/328L/372V, 135G/141V/143A/145E/160L/169S/311D/315V/372V, 135G/141V/160L/311D/315V/328L/372V, 135G/141V/143A/145E/160L/262S/311D/315V/372V, 135G/141V/145E/160L/262S/311D/312I/315V/328L/372V, 135G/139L/141V/156V/157G/160L/311D/315V/372V, 135G/139C/141V/145E/160L/311D/312I/315V/372V, 135G/141V/160L/311D/312I/315V/372V, 135G/139C/141V/160L/311D/315V/372V, 135G/139C/141V/160L/311D/312I/315V/372V, 135G/139C/141V/156V/160L/311D/315V/372V, 135G/139C/141V/143A/145E/160L/243L/311D/315V/372V, 135G/141V/145E/157G/160L/311D/315V/372V, 135G/141V/145E/160L/311D/315V/346T/372V, 135G/141V/145E/160L/262A/311D/312I/315V/328L/345R/346T/372V, 135G/141V/145E/160L/262A/311D/315V/372V, 135G/141V/160L/311D/312I/315V/342G/372V, 135G/141V/143A/160L/243L/311D/315V/372V, 135G/139C/141V/160L/311D/315V/345R/372V, 135G/141V/160L/311D/315V/342G/372V, 135G/141V/143A/145E/160L/262S/311D/315V/342G/372V, 135G/139L/141V/143A/160L/169S/311D/315V/372V, 135G/139C/141V/143A/145E/160L/311D/312I/315V/372V, 135G/141V/160L/169S/311D/315V/372V, 135G/139L/141V/145E/160L/262A/311D/312I/315V/328L/342G/345R/346T/372V, 135G/139C/141V/160L/311D/315V/328L/372V, 135G/139L/141V/160L/243L/311D/315V/372V, 135G/139L/141V/143A/160L/311D/315V/328L/372V, 135G/139L/141V/160L/311D/315V/372V, 135G/139C/141V/143A/160L/243L/311D/315V/372V, 135G/139C/141V/145E/160L/311D/315V/372V, 135G/141V/145E/160L/311D/312I/315V/372V, 135G/141V/145E/160L/169S/311D/315V/372V, 135G/139C/141V/143A/157G/160L/311D/312I/315V/372V, 84M/135G/139C/143A/141V/160L/311D/315V/372V, 135G/141V/145E/160L/269Q/311D/315V/372V, 135G/141V/143A/145E/157G/160L/269Q/311D/312I/315V/328L/372V, 135G/141V/143A/145E/160L/269Q/311D/315V/372V, 135G/141V/157G/160L/311D/315V/372V, or 135G/139L/141V/143A/160L/311D/312I/315V/372V, wherein the amino acid positions are relative to the reference sequence corresponding to residues 135-413 of SEQ ID NO: 4 or 628, or relative to the reference sequence corresponding to SEQ ID NO: 4 or 628.

[0185] In some embodiments, the amino acid sequence of the engineered protease polypeptide comprises at least a substitution set or amino acid residues 135G/141V/160L/256L/311D/315V/372V, 135G/141V/160L/311D/315V/372V/411T, 135G/141V/160L/273F/311D/315V/372V, 135G/141V/160L/311D/315V/372V/409E, 135G/141V/160L/268G/311D/315V/372V, 135G/141V/160L/172Q/311D/315V/372V, 135G/141V/160L/311D/315V/372V/409R, 135G/141V/160L/311D/315V/372V/401L, 135G/141V/160L/281C/311D/315V/372V, 135G/141V/160L/311D/315V/372V/410W, 135G/141V/160L/253V/311D/315V/372V, 135G/141V/160L/311D/315V/372V/406M, 135G/141V/160L/273T/311D/315V/372V, 135G/141V/160L/311D/315V/372V/406R, 135G/141V/160L/256M/311D/315V/372V, 135G/141V/160L/311D/315V/372V/410I, 135G/141V/160L/273M/311D/315V/372V, 135G/141V/160L/273L/311D/315V/372V, 135G/141V/143A/145E/160L/243L/311D/315V/328L/372V, 135G/141V/145E/160L/311D/315V/372V, 135G/139C/141V/143A/145E/160L/311D/315V/328L/342G/345R/372V, 135G/139L/141V/145E/160L/311D/315V/372V, 135G/141V/143A/160L/311D/315V/328L/342G/345R/372V, 135G/141V/145E/160L/311D/315V/342G/345R/372V, 135G/141V/143A/160L/311D/315V/372V, 135G/141V/139C/143A/160L/311D/315V/372V, 135G/139C/141V/145E/160L/311D/315V/328L/342G/345R/372V, 135G/141V/143A/145E/160L/169S/311D/312I/315V/328L/345R/346T/372V, 135G/141V/143A/160L/243L/311D/315V/328L/342G/345R/346T/372V, 135G/139C/141V/143A/157G/160L/169S/311D/315V/328L/346T/372V, 135G/143A/141V/145E/156V/160L/311D/312I/315V/328L/372V, 135G/139C/141V/145E/157G/160L/311D/312I/315V/328L/372V, 135G/141V/143A/160L/311D/315V/328L/342G/345R/346T/372V, 135G/139C/141V/143A/160L/311D/315V/328L/372V, 135G/141V/143A/145E/160L/311D/315V/372V, 135G/141V/143A/145E/160L/311D/312I/315V/342G/345R/372V, or 135G/141V/143A/145E/160L/311D/315V/328L/372V, wherein the amino acid positions are relative to the reference sequence corresponding to residues 135-413 of SEQ ID NO: 4 or 628, or relative to the reference sequence corresponding to SEQ ID NO: 4 or 628.

[0186] In some embodiments, the amino acid sequence of the engineered protease polypeptide comprises at least a substitution set at amino acid positions 135/141/143/160/279/311/315/328/342/345/372, 135/141/143/160/250/311/315/328/342/345/372, 135/141/143/154/160/311/315/328/342/345/372, 135/141/143/160/214/311/315/328/342/345/372, 135/141/143/160/249/311/315/328/342/345/372, 135/141/143/160/275/311/315/328/342/345/372, 135/137/141/143/160/311/315/328/342/345/372, 135/141/143/160/161/311/315/328/342/345/372, 135/141/143/160/180/311/315/328/342/345/372, 135/141/143/160/174/311/315/328/342/345/372, 135/139/141/143/160/311/315/328/342/345/372, 135/141/143/160/254/311/315/328/342/345/372, 135/141/143/145/160/311/315/328/342/345/372, 135/141/143/160/278/311/315/328/342/345/372, 135/136/141/143/160/311/315/328/342/345/372, 135/141/143/154/160/311/315/328/342/345/372/413, 135/141/143/160/294/311/315/328/342/345/372, 135/141/143/160/237/311/315/328/342/345/372, 135/141/143/160/311/315/328/342/345/372, 135/141/143/160/274/311/315/328/342/345/372, 135/141/143/160/264/311/315/328/342/345/372, 135/141/143/160/185/311/315/328/342/345/372, 135/141/143/160/277/311/315/328/342/345/372, 135/141/143/160/293/311/315/328/342/345/372, 135/141/143/160/233/311/315/328/342/345/372, 135/141/143/160/173/311/315/328/342/345/372, 135/141/143/160/311/312/315/328/342/345/372, 135/141/143/160/302/311/315/328/342/345/372, 135/141/143/160/238/311/315/328/342/345/372, 141/143/160/311/315/328/342/345/372, 135/141/143/160/221/311/315/328/342/345/372, 135/141/143/160/290/311/315/328/342/345/372, 135/141/143/160/263/311/315/328/342/345/372, 135/141/143/160/267/311/315/328/342/345/372, 135/141/143/160/239/311/315/328/342/345/372, 135/141/143/160/163/311/315/328/342/345/372, 135/141/143/160/292/311/315/328/342/345/372, 135/141/143/160/246/311/315/328/342/345/372, 135/141/143/160/243/311/315/328/342/345/372, 135/141/143/160/235/311/315/328/342/345/372, 135/141/143/156/160/311/315/328/342/345/372, 135/141/143/160/223/311/315/328/342/345/372, 135/141/143/160/278/311/315/328/342/345/372/413, 135/141/143/160/297/311/315/328/342/345/372, 135/141/143/160/194/311/315/328/342/345/372, 135/141/143/160/251/311/315/328/342/345/372, 135/141/143/145/157/160/253/268/273/281/311/312/315/328/342/345/346/411/372, 135/139/141/143/160/311/315/328/342/345/346/372, 135/141/143/160/253/311/315/328/342/345/372, 135/141/143/160/311/315/328/342/345/346/372/411, 135/141/143/160/253/311/315/328/342/345/346/372, 135/141/143/160/311/312/315/328/342/345/346/372, 135/141/143/160/273/311/312/315/328/342/345/372, 135/141/143/160/253/281/311/315/328/342/345/372, 135/141/143/157/160/253/273/311/312/315/328/342/345/346/372/411, 135/139/141/143/157/160/253/268/273/281/311/312/315/328/342/345/346/372, 135/141/143/160/253/273/311/315/328/342/345/372/411, 135/139/141/143/160/253/268/273/281/311/315/328/342/345/372, 135/139/141/143/157/160/311/315/328/342/345/372/411, 135/141/143/157/160/311/315/328/342/345/372, 135/141/143/160/273/311/315/328/342/345/372, 135/139/141/143/160/253/268/273/281/311/312/315/328/342/345/372/411, 135/141/143/157/160/253/311/315/328/342/345/372/411, 135/139/141/143/145/160/253/311/315/328/342/345/346/372, 135/139/141/143/157/160/253/273/311/312/315/328/342/345/372, 135/139/141/143/157/160/268/273/311/312/315/328/342/345/346/372, 135/141/143/157/160/273/311/312/315/328/342/345/346/372, 135/139/141/143/160/311/315/328/342/345/372/411, 135/139/141/143/160/253/268/273/281/311/312/315/328/342/345/346/372/411, 135/141/143/157/160/273/311/315/328/342/345/346/372/411, 135/139/141/143/145/157/160/162/253/273/281/311/312/315/328/342/345/372, 135/139/141/143/160/253/273/281/311/312/315/328/342/345/372, 135/141/143/157/160/253/268/273/281/311/312/315/328/342/345/372, 135/139/141/143/160/253/268/311/315/328/342/345/372, 135/139/141/143/157/160/311/312/315/328/342/345/372, 135/141/143/160/253/273/281/311/315/328/342/345/346/372, 135/141/143/157/160/253/311/312/315/328/342/345/346/372/411, 135/141/143/157/160/273/311/312/315/328/342/345/346/372/411, 135/139/141/143/145/157/160/253/268/281/311/312/315/328/342/345/372, 135/139/141/143/160/273/311/312/315/328/342/345/346/372, 135/141/143/157/160/253/268/273/311/312/315/328/342/345/346/372, 135/139/141/143/160/268/311/315/328/342/345/346/372, 135/141/143/160/268/273/311/312/315/328/342/345/346/372, 135/139/141/143/157/160/253/268/273/311/312/315/328/342/345/372, 135/139/141/143/157/160/253/311/315/328/342/345/372, 135/139/141/143/160/253/281/311/315/328/342/345/372, 135/139/141/143/157/160/253/268/273/311/315/328/342/345/372, 135/141/143/160/253/311/312/315/328/342/345/372/411, or 135/139/141/143/160/268/273/311/315/328/342/345/372, wherein the amino acid positions are relative to the reference sequence corresponding to residues 135-413 of SEQ ID NO: 4 or 628, or relative to the reference sequence corresponding to SEQ ID NO: 4 or 628.

[0187] In some embodiments, the amino acid sequence of the engineered protease polypeptide comprises at least a substitution set or amino acid residues 135G/141V/143A/160L/279Y/311D/315V/328L/342G/345R/372V, 135G/141V/143A/160L/250T/311D/315V/328L/342G/345R/372V, 135G/141V/143A/154C/160L/311D/315V/328L/342G/345R/372V, 135G/141V/143A/160L/214Y/311D/315V/328L/342G/345R/372V, 135G/141V/143A/160L/249S/311D/315V/328L/342G/345R/372V, 135G/141V/143A/160L/275A/311D/315V/328L/342G/345R/372V, 135G/137A/141V/143A/160L/311D/315V/328L/342G/345R/372V, 135G/141V/143A/160L/161D/311D/315V/328L/342G/345R/372V, 135G/141V/143A/160L/180H/311D/315V/328L/342G/345R/372V, 135G/141V/143A/160L/174L/311D/315V/328L/342G/345R/372V, 135G/139K/141V/143A/160L/311D/315V/328L/342G/345R/372V, 135G/141V/143A/160L/254C/311D/315V/328L/342G/345R/372V, 135G/141V/143A/145E/160L/311D/315V/328L/342G/345R/372V, 135G/141V/143A/160L/278V/311D/315V/328L/342G/345R/372V, 135G/136M/141V/143A/160L/311D/315V/328L/342G/345R/372V, 135G/141V/143A/154L/160L/311D/315V/328L/342G/345R/372V/413D, 135G/141V/143A/160L/294V/311D/315V/328L/342G/345R/372V, 135G/141V/143A/154R/160L/311D/315V/328L/342G/345R/372V, 135G/141V/143A/160L/237A/311D/315V/328L/342G/345R/372V, 135G/141V/143A/160L/311D/315V/328L/342G/345R/372V, 135G/141V/143A/160L/274G/311D/315V/328L/342G/345R/372V, 135G/141V/143A/160L/264P/311D/315V/328L/342G/345R/372V, 135G/141V/143A/160L/274T/311D/315V/328L/342G/345R/372V, 135G/141V/143A/160L/278N/311D/315V/328L/342G/345R/372V, 135G/141V/143A/160L/214A/311D/315V/328L/342G/345R/372V, 135G/141V/143A/160L/185G/311D/315V/328L/342G/345R/372V, 135G/141V/143A/160L/214V/311D/315V/328L/342G/345R/372V, 135G/141V/143A/160L/279T/311D/315V/328L/342G/345R/372V, 135G/141V/143A/160L/277G/311D/315V/328L/342G/345R/372V, 135G/141V/143A/160L/264I/311D/315V/328L/342G/345R/372V, 135G/141V/143A/160L/293A/311D/315V/328L/342G/345R/372V, 135G/141V/143A/160L/233L/311D/315V/328L/342G/345R/372V, 135G/141V/143A/160L/278Y/311D/315V/328L/342G/345R/372V, 135G/141V/143A/160L/173F/311D/315V/328L/342G/345R/372V, 135G/141V/143A/160L/274L/311D/315V/328L/342G/345R/372V, 135G/141V/143A/160L/311D/312C/315V/328L/342G/345R/372V, 135G/141V/143A/160L/279L/311D/315V/328L/342G/345R/372V, 135G/141V/143A/160L/302G/311D/315V/328L/342G/345R/372V, 135G/141V/143A/160L/238Q/311D/315V/328L/342G/345R/372V, 135G/141V/143A/160L/294W/311D/315V/328L/342G/345R/372V, 141V/143A/160L/311D/315V/328L/342G/345R/372V, 135G/141V/143A/160L/221E/311D/315V/328L/342G/345R/372V, 135G/141V/143A/160L/290S/311D/315V/328L/342G/345R/372V, 135G/141V/143A/160L/278S/311D/315V/328L/342G/345R/372V, 135G/141V/143A/160L/263Q/311D/315V/328L/342G/345R/372V, 135G/141V/143A/160L/263H/311D/315V/328L/342G/345R/372V, 135G/141V/143A/160L/278L/311D/315V/328L/342G/345R/372V, 135G/141V/143A/160L/263E/311D/315V/328L/342G/345R/372V, 135G/141V/143A/154L/160L/311D/315V/328L/342G/345R/372V, 135G/139M/141V/143A/160L/311D/315V/328L/342G/345R/372V, 135G/137S/141V/143A/160L/311D/315V/328L/342G/345R/372V, 135G/141V/143A/160L/233G/311D/315V/328L/342G/345R/372V, 135G/139F/141V/143A/160L/311D/315V/328L/342G/345R/372V, 135G/141V/143A/160L/267I/311D/315V/328L/342G/345R/372V, 135G/141V/143A/160L/221L/311D/315V/328L/342G/345R/372V, 135G/141V/143A/160L/173S/311D/315V/328L/342G/345R/372V, 135G/141V/143A/160L/302P/311D/315V/328L/342G/345R/372V, 135G/141V/143A/160L/221V/311D/315V/328L/342G/345R/372V, 135G/141V/143A/160L/239M/311D/315V/328L/342G/345R/372V, 135G/141V/143A/160L/290G/311D/315V/328L/342G/345R/372V, 135G/141V/143A/160L/163H/311D/315V/328L/342G/345R/372V, 135G/141V/143A/160L/292V/311D/315V/328L/342G/345R/372V, 135G/141V/143A/160L/246V/311D/315V/328L/342G/345R/372V, 135G/141V/143A/160L/214N/311D/315V/328L/342G/345R/372V, 135G/141V/143A/160L/243S/311D/315V/328L/342G/345R/372V, 135G/141V/143A/160L/233I/311D/315V/328L/342G/345R/372V, 135G/141V/143A/160L/235Q/311D/315V/328L/342G/345R/372V, 135G/141V/143A/145D/160L/311D/315V/328L/342G/345R/372V, 135G/141V/143A/160L/274V/311D/315V/328L/342G/345R/372V, 135G/141V/143A/160L/279M/311D/315V/328L/342G/345R/372V, 135G/141V/143A/160L/185S/311D/315V/328L/342G/345R/372V, 135G/141V/143A/160L/279K/311D/315V/328L/342G/345R/372V, 135G/141V/143A/145W/160L/311D/315V/328L/342G/345R/372V, 135G/141V/143A/160L/290E/311D/315V/328L/342G/345R/372V, 135G/141V/143A/160L/214P/311D/315V/328L/342G/345R/372V, 135G/141V/143A/156V/160L/311D/315V/328L/342G/345R/372V, 135G/141V/143A/156C/160L/311D/315V/328L/342G/345R/372V, 135G/141V/143A/160L/223S/311D/315V/328L/342G/345R/372V, 135G/141V/143A/160L/278V/311D/315V/328L/342G/345R/372V/413D, 135G/141V/143A/160L/250C/311D/315V/328L/342G/345R/372V, 135G/141V/143A/160L/267S/311D/315V/328L/342G/345R/372V, 135G/141V/143A/160L/297F/311D/315V/328L/342G/345R/372V, 135G/141V/143A/160L/221Q/311D/315V/328L/342G/345R/372V, 135G/141V/143A/160L/194D/311D/315V/328L/342G/345R/372V, 135G/141V/143A/160L/311D/315V/328L/342G/345R/372V, 135G/141V/143A/160L/251T/311D/315V/328L/342G/345R/372V, 135G/141V/143A/145P/157R/160L/253I/268G/273T/281V/311D/312Q/315V/328L/342G/345R/346T/411T/372V, 135G/139C/141V/143A/160L/311D/315V/328L/342G/345R/346A/372V, 135G/141V/143A/160L/253V/311D/315V/328L/342G/345R/372V, 135G/141V/143A/160L/311D/315V/328L/342G/345R/346T/372V/411T, 135G/141V/143A/160L/253V/311D/315V/328L/342G/345R/346T/372V, 135G/139C/141V/143A/160L/311D/315V/328L/342G/345R/346T/372V, 135G/141V/143A/160L/311D/312Q/315V/328L/342G/345R/346T/372V, 135G/141V/143A/160L/273T/311D/S312Q/315V/328L/342G/345R/372V, 135G/141V/143A/160L/253I/281V/311D/315V/328L/342G/345R/372V, 135G/141V/143A/157R/160L/253V/273T/311D/312Q/315V/328L/342G/345R/346T/372V/41 IT, 135G/139C/141V/143A/157K/160L/253V/268G/273F/281V/311D/312Q/315V/328L/342G/345R/346A/372V, 135G/141V/143A/160L/253V/273T/311D/315V/328L/342G/345R/372V/411T, 135G/139C/141V/143A/160L/253I/268F/273T/281V/311D/315V/328L/342G/345R/372V, 135G/139C/141V/143A/157R/160L/311D/315V/328L/342G/345R/372V/411T, 135G/141V/143A/157G/160L/311D/315V/328L/342G/345R/372V, 135G/141V/143A/160L/273T/311D/315V/328L/342G/345R/372V, 135G/139C/141V/143A/160L/253V/268G/273F/281V/311D/312Q/315V/328L/342G/345R/372V/41 iT, 135G/141V/143A/157G/160L/253V/311D/315V/328L/342G/345R/372V/41 iT, 135G/139C/141V/143A/145E/160L/253V/311D/315V/328L/342G/345R/346T/372V, 135G/139C/141V/143A/157K/160L/253V/273T/311D/312Q/315V/328L/342G/345R/372V, 135G/139C/141V/143A/157G/160L/268G/273T/311D/312Q/315V/328L/342G/345R/346T/372V, 135G/141V/143A/157G/160L/273T/311D/312Q/315V/328L/342G/345R/346T/372V, 135G/139C/141V/143A/160L/311D/315V/328L/342G/345R/372V/41 iT, 135G/139C/141V/143A/160L/253V/268G/273F/281C/311D/312I/315V/328L/342G/345R/346T/372V/411T, 135G/141V/143A/157K/160L/273F/311D/315V/328L/342G/345R/346T/372V/411T, 135G/139C/141V/143A/145E/157G/160L/162I/253V/273F/281V/311D/312Q/315V/328L/342G/345R/372V, 135G/139C/141V/143A/160L/253V/273T/281C/311D/312Q/315V/328L/342G/345R/372V, 135G/141V/143A/157G/160L/253V/268F/273F/281V/311D/312Q/315V/328L/342G/345R/372V, 135G/139C/141V/143A/160L/253I/268F/311D/315V/328L/342G/345R/372V, 135G/139C/141V/143A/157R/160L/311D/312Q/315V/328L/342G/345R/372V, 135G/141V/143A/160L/253V/273T/281C/311D/315V/328L/342G/345R/346T/372V, 135G/141V/143A/157K/160L/253V/311D/312I/315V/328L/342G/345R/346T/372V/411T, 135G/141V/143A/157R/160L/273T/311D/312Q/315V/328L/342G/345R/346T/372V/41 IT, 135G/139C/141V/143A/145E/157K/160L/253V/268G/281C/311D/312Q/315V/328L/342G/345R/372V, 135G/139C/141V/143A/160L/273T/311D/312Q/315V/328L/342G/345R/346T/372V, 135G/141V/143A/157K/160L/253V/268F/273T/311D/312I/315V/328L/342G/345R/346T/372V, 135G/139C/141V/143A/160L/268G/311D/315V/328L/342G/345R/346T/372V, 135G/141V/143A/157K/160L/311D/315V/328L/342G/345R/372V, 135G/141V/143A/160L/268G/273F/311D/312Q/315V/328L/342G/345R/346T/372V, 135G/139C/141V/143A/157K/160L/253V/268F/273F/311D/312Q/315V/328L/342G/345R/372V, 135G/141V/143A/157K/160L/273T/311D/312Q/315V/328L/342G/345R/346T/372V, 135G/139C/141V/143A/157G/160L/253V/311D/315V/328L/342G/345R/372V, 135G/139C/141V/143A/160L/311D/315V/328L/342G/345R/372V, 135G/139C/141V/143A/160L/253V/281V/311D/315V/328L/342G/345R/372V, 135G/139C/141V/143A/157G/160L/253V/268G/273T/311D/315V/328L/342G/345R/372V, 135G/141V/143A/160L/253V/311D/312Q/315V/328L/342G/345R/372V/41 IT, 135G/139C/141V/143A/160L/268G/273T/311D/315V/328L/342G/345R/372V, or 135G/141V/143A/160L/253I/311D/315V/328L/342G/345R/372V, wherein the amino acid positions are relative to the reference sequence corresponding to residues 135-413 of SEQ ID NO: 4 or 628, or relative to the reference sequence corresponding to SEQ ID NO: 4 or 628.

[0188] In some embodiments, the amino acid sequence of the engineered protease polypeptide comprises at least a substitution set at amino acid positions 135/139/141/143/157/160/268/273/311/312/315/31/328/342/345/346/372, 135/139/141/143/157/160/268/273/311/312/315/318/328/342/345/346/372, 135/139/141/143/157/160/268/273/296/311/312/315/328/342/345/346/372, 135/139/141/143/157/160/252/268/273/311/312/315/328/342/345/346/372, 135/139/141/143/157/160/268/273/303/311/312/315/328/342/345/346/372, 135/139/141/143/157/160/253/268/273/311/312/315/328/342/345/346/372, 135/139/141/143/157/160/268/273/311/312/315/328/342/345/346/372/413, 135/139/141/143/157/160/268/273/311/312/315/328/342/345/346/372/386, 135/139/141/143/157/160/268/273/311/312/315/328/342/345/346/372, 135/139/141/143/157/160/235/268/273/311/312/315/328/342/345/346/372, 135/139/141/143/157/160/268/273/311/312/315/328/342/345/346/372/412, 135/139/141/143/157/160/268/273/302/311/312/315/328/342/345/346/372, 135/139/141/143/157/160/268/273/311/312/315/328/342/345/346/371/372, 135/139/141/143/157/160/268/273/311/312/315/328/342/345/346/372/405, 135/139/141/143/157/160/268/273/311/312/315/328/342/345/346/372/389, 135/139/141/143/157/160/268/273/311/312/315/328/342/345/346/372/391, 135/139/141/143/157/160/268/273/311/312/315/328/342/345/346/358/372, 135/141/143/157/160/268/312/315/342/345/346, 135/139/141/143/157/160/268/273/312/315/328/342/345/346/372, 135/139/141/143/157/160/268/273/311/315/328/342/345/346/372, 135/139/141/143/157/160/268/273/311/312/315/328/342/345/346, 135/141/312/328/342/345/346/372, 135/139/141/157/160/268/273/311/312/315/328/342/345/346/372, 135/141/157/160/268/273/311/312/315/328/342/345/346/372, 135/141/143/157/268/273/311315/328/342/345/346, 135/139/141/157/160/268/311/312/315/342/345/346/372, 135/139/141/143/157/160/268/273/311/312/315/328/342/345/372, 141/143/157/273/311/315/328/345/372, 135/143/157/160/268/311/312/315/328/342/345/346/372, 139/157/160/311/315/328/342/345/346, 135/157/160/268/273/312/315/328/342/345/346/372, 135/141/143/160/273/311/312/315/342/345, 53/135/157/160/268/311/312/315/328/342/345/346, 135/141/143/157/160/268/273/311/312/315/328/342/345/346/372, 135/157/160/268/311/315/328/342/345/346/372, 135/137/141/143/157/160/221/233/268/273/311/312/315/328/342/345/346/372/413, 135/139/141/143/157/160/233/268/273/311/312/315/328/342/345/346/372, 135/139/141/143/157/160/221/268/273/279/311/312/315/328/342/345/346/372, 135/137/141/143/157/160/233/268/273/279/311/312/315/328/342/345/346/372, 135/139/141/143/157/160/221/268/273/311/312/315/328/342/345/346/372, 135/139/141/143/157/160/214/268/273/311/312/315/328/342/345/346/372, 135/137/141/143/156/157/160/268/273/311/312/315/328/342/345/346/372, 135/139/141/143/157/160/214/221/268/273/311/312/315/328/342/345/346/372, 135/137/139/141/143/157/160/221/233/268/273/279/311/312/315/328/342/345/346/372, 135/137/139/141/143/157/160/221/268/273/311/312/315/328/342/345/346/372, 135/137/139/141/143/157/160/268/273/311/312/315/328/342/345/346/372, 135/137/139/141/143/157/160/268/273/279/311/312/315/328/342/345/346/372, 135/137/141/143/157/160/268/273/311/312/315/328/342/345/346/372, 135/137/139/141/143/157/160/214/268/273/279/311/312/315/328/342/345/346/372, 135/139/141/143/157/160/266/268/273/311/312/315/328/342/345/346/372, 135/137/139/141/143/156/157/160/214/268/273/311/312/315/328/342/345/346/372, 135/137/139/141/143/157/160/221/233/268/273/311/312/315/328/342/345/346/372, 135/137/141/143/156/157/160/221/268/273/311/312/315/328/342/345/346/372, 135/137/139/141/143/157/160/214/268/273/311/312/315/328/342/345/346/372, 135/139/141/143/157/160/268/273/279/311/312/315/328/342/345/346/372, 135/137/139/141/143/157/160/233/268/273/311/312/315/328/342/345/346/372, 135/137/141/143/157/160/214/233/268/273/311/312/315/328/342/345/346/372, 135/139/141/143/157/160/221/268/273/311/312/315/328/342/345/346/372/413, 135/137/139/141/143/157/160/214/233/268/273/311/312/315/328/342/345/346/372, 135/137/141/143/157/160/221/233/268/273/279/311/312/315/328/342/345/346/372, 135/137/139/141/143/156/157/160/268/273/311/312/315/328/342/345/346/372, 135/137/139/141/143/157/160/221/268/273/311/312/315/328/342/345/346/372/413, 135/137/139/141/143/157/160/268/273/311/312/315/328/342/345/346/372/413, 135/137/139/141/143/157/160/221/268/273/279/311/312/315/328/342/345/346/372, or 135/137/141/143/156/157/160/214/233/268/273/311/312/315/328/342/345/346/372/413, wherein the amino acid positions are relative to the reference sequence corresponding to residues 135-413 of SEQ ID NO: 4 or 628, or relative to the reference sequence corresponding to SEQ ID NO: 4 or 628.

[0189] In some embodiments, the amino acid sequence of the engineered protease polypeptide comprises at least a substitution set or amino acid residues 31G/135G/139C/141V/143A/157G/160L/268G/273T/311D/312Q/315V/328L/342G/345R/346T/372V, 135G/139C/141V/143A/157G/160L/268G/273T/311D/312Q/315V/318R/328L/342G/345R/346T/372V, 135G/139C/141V/143A/157G/160L/268G/273T/296R/311D/312Q/315V/328L/342G/345R/346T/372V, 135G/139C/141V/143A/157G/160L/268G/273T/296M/311D/312Q/315V/328L/342G/345R/346T/372V, 135G/139C/141V/143A/157G/160L/252P/268G/273T/311D/312Q/315V/328L/342G/345R/346T/372V, 135G/139C/141V/143A/157G/160L/268G/273T/303A/311D/312Q/315V/328L/342G/345R/346T/372V, 135G/139C/141V/143A/157G/160L/253C/268G/273T/311D/312Q/315V/328L/342G/345R/346T/372V, 135G/139C/141V/143A/157G/160L/268G/273T/311D/312Q/315V/328L/342G/345R/346T/372V/413C, 135G/139C/141V/143A/157G/160L/268G/273T/311D/312Q/315V/328L/342G/345R/346T/372V/386P, 135G/139C/141V/143A/157G/160L/268G/273T/311D/312Q/315V/328L/342G/345R/346T/372V/413A, 135G/139C/141V/143A/157G/160L/268G/273T/311D/312R/315V/328L/342G/345R/346T/372V, 135G/139C/141V/143A/157G/160L/235R/268G/273T/311D/312Q/315V/328L/342G/345R/346T/372V, 135G/139C/141V/143A/157G/160L/268G/273T/311D/312Q/315V/328L/342G/345R/346T/372V/412P, 135G/139C/141V/143A/157G/160L/268G/273T/311D/312Q/315V/328L/342A/345R/346T/372V, 135G/139C/141V/143A/157G/160L/268G/273T/311D/312Q/315V/328L/342G/345R/346T/372V/413S, 135G/139C/141V/143A/157G/160L/268G/273T/302P/311D/312Q/315V/328L/342G/345R/346T/372V, 135G/139C/141V/143A/157G/160L/268G/273T/311D/312Q/315V/328L/342G/345R/346T/371L/372V, 135G/139C/141V/143A/157G/160L/268G/273T/311D/312Q/315V/328L/342G/345R/346T/372V/405L, 135G/139C/141V/143A/157G/160L/268G/273T/311D/312A/315V/328L/342G/345R/346T/372V, 135G/139C/141V/143A/157G/160L/268G/273T/311D/312Q/315V/328L/342G/345R/346T/372V/389P, 135G/139C/141V/143A/157G/160L/268G/273T/311D/312Q/315V/318P/328L/342G/345R/346T/372V, 135G/139C/141V/143A/157G/160L/268G/273T/311D/312Q/315V/328L/342G/345R/346T/372V/391S, 135G/139C/141V/143A/157G/160L/268G/273T/311D/312Q/315V/328L/342G/345R/346T/372V/412T, 135G/139C/141V/143A/157G/160L/268G/273T/311D/312Q/315V/328L/342G/345R/346T/358S/372V, 135G/139C/141V/143A/157G/160L/268G/273T/311D/312Q/315V/328L/342G/345R/346T/372V/389C, 135G/139C/141V/143A/157G/160L/235V/268G/273T/311D/312Q/315V/328L/342G/345R/346T/372V, 135G/139C/141V/143A/157G/160L/268G/273T/311D/312Q/315V/328L/342G/345R/346T/372V/391L, 135G/141V/143A/157G/160L/268G/312Q/315V/342G/345R/346T, 135G/139C/141V/143A/157G/160L/268G/273T/312Q/315V/328L/342G/345R/346T/372V, 135G/139C/141V/143A/157G/160L/268G/273T/311D/315V/328L/342G/345R/346T/372V, 135G/139C/141V/143A/157G/160L/268G/273T/311D/312Q/315V/328L/342G/345R/346T, 135G/141V/312Q/328L/342G/345R/346T/372V, 135G/139C/141V/157G/160L/268G/273T/311D/312Q/315V/328L/342G/345R/346T/372V, 135G/141V/157G/160L/268G/273T/311D/312Q/315V/328L/342G/345R/346T/372V, 135G/141V/143A/157G/268G/273T/311D/315V/328L/342G/345R/346T, 135G/139C/141V/157G/160L/268G/311D/312Q/315V/342G/345R/346T/372V, 135G/139C/141V/143A/157G/160L/268G/273T/311D/312Q/315V/328L/342G/345R/372V, 141V/143A/157G/273T/311D/315V/328L/345R/372V, 135G/143A/157G/160L/268G/311D/312Q/315V/328L/342G/345R/346T/372V, 139C/157G/160L/311D/315V/328L/342G/345R/346T, 135G/157G/160L/268G/273T/312Q/315V/328L/342G/345R/346T/372V, 135G/141V/143A/160L/273T/311D/312Q/315V/342G/345R, 53A/135G/157G/160L/268G/311D/312Q/315V/328L/342G/345R/346T, 135G/141V/143A/157G/160L/268G/273T/311D/312Q/315V/328L/342G/345R/346T/372V, 135G/157G/160L/268G/311D/315V/328L/342G/345R/346T/372V, 135G/139L/141V/143A/157G/160L/268G/273T/311D/312Q/315V/328L/342G/345R/346T/372V, 135G/137A/141V/143A/157G/160L/221Q/233L/268G/273T/311D/312Q/315V/328L/342G/345R/346T/372V/413D, 135G/139C/141V/143A/157G/160L/S233L/268G/273T/311D/312Q/315V/328L/342G/345R/346T/372V 135G/139C/141V/143A/157G/160L/221Q/268G/273T/279K/311D/312Q/315V/328L/342G/345R/346T/372V, 135G/137N/141V/143A/157G/160L/233L/268G/273T/279M/311D/312Q/315V/328L/342G/345R/346T/372V, 135G/139C/141V/143A/157G/160L/221Q/268G/273T/311D/312Q/315V/328L/342G/345R/346T/372V, 135G/139L/141V/143A/157G/160L/214V/268G/273T/311D/312Q/315V/328L/342G/345R/346T/372V, 135G/137N/141V/143A/T156V/157G/160L/268G/273T/311D/312Q/315V/328L/342G/345R/346T/372V, 135G/139C/141V/143A/157G/160L/268G/273T/311D/312Q/315V/328L/342G/345R/346T/372V, 135G/139L/141V/143A/157G/160L/214V/221Q/268G/273T/311D/312Q/315V/328L/342G/345R/346T/372V, 135G/137A/139L/141V/143A/157G/160L/221Q/233L/268G/273T/279K/311D/312Q/315V/328L/342G/345R/346T/372V, 135G/137A/139L/141V/143A/157G/160L/221Q/268G/273T/311D/312Q/315V/328L/342G/345R/346T/372V, 135G/137N/139L/141V/143A/157G/160L/268G/273T/311D/312Q/315V/328L/342G/345R/346T/372V, 135G/137N/139L/141V/143A/157G/160L/268G/273T/279K/311D/312Q/315V/328L/342G/345R/346T/372V, 135G/137A/141V/143A/157G/160L/268G/273T/311D/312Q/315V/328L/342G/345R/346T/372V, 135G/137N/139C/141V/143A/157G/160L/268G/273T/311D/312Q/315V/328L/342G/345R/346T/372V, 135G/137N/139L/141V/143A/157G/160L/221Q/268G/273T/311D/312Q/315V/328L/342G/345R/346T/372V, 135G/137N/139L/141V/143A/157G/160L/214P/268G/273T/279M/311D/312Q/315V/328L/342G/345R/346T/372V, 135G/139C/141V/143A/157G/160L/266Y/268G/273T/311D/312Q/315V/328L/342G/345R/346T/372V, 135G/139L/141V/143A/157G/160L/221Q/268G/273T/311D/312Q/315V/328L/342G/345R/346T/372V, 135G/137N/139C/141V/143A/157G/160L/221Q/268G/273T/311D/312Q/315V/328L/342G/345R/346T/372V, 135G/137N/141V/143A/157G/160L/268G/273T/311D/312Q/315V/328L/342G/345R/346T/372V, 135G/137N/139C/141V/143A/156V/157G/160L/214V/268G/273T/311D/312C/315V/328L/342G/345R/346T/372V, 135G/137N/139C/141V/143A/157G/160L/221Q/233L/268G/273T/311D/312Q/315V/328L/342G/345R/346T/372V, 135G/137N/141V/143A/156V/157G/160L/221Q/268G/273T/311D/312Q/315V/328L/342G/345R/346T/372V, 135G/137A/139L/141V/143A/157G/160L/214V/268G/273T/311D/312Q/315V/328L/342G/345R/346T/372V, 135G/139C/141V/143A/157G/160L/268G/273T/311D/312Q/315V/328L/342G/345R/346T/372V/413D, 135G/139C/141V/143A/157G/160L/268G/273T/279K/311D/312Q/315V/328L/342G/345R/346T/372V, 135G/139C/141V/143A/157G/160L/268G/273T/279M/311D/312Q/315V/328L/342G/345R/346T/372V, 135G/137A/139L/141V/143A/157G/160L/233L/268G/273T/311D/312Q/315V/328L/342G/345R/346T/372V, 135G/137N/141V/143A/157G/160L/214V/233I/268G/273T/311D/312Q/315V/328L/342G/345R/346T/372V, 135G/139C/141V/143A/157G/160L/221Q/268G/273T/311D/312Q/315V/328L/342G/345R/346T/372V/413D, 135G/137N/139C/141V/143A/157G/160L/S214V/S233L/268G/273T/311D/312Q/315V/328L/342G/345R/346T/372V, 135G/137A/139L/141V/143A/157G/160L/214P/268G/273T/311D/312Q/315V/328L/342G/345R/346T/372V, 135G/137N/141V/143A/157G/160L/221Q/233L/268G/273T/Q279M/311D/312Q/315V/328L/342G/345R/346T/372V, 135G/137N/139C/141V/143A/156V/157G/160L/268G/273T/311D/312Q/315V/328L/342G/345R/346T/372V, 135G/137N/139L/141V/143A/157G/160L/221Q/233I/268G/273T/311D/312Q/315V/328L/342G/345R/346T/372V, 135G/139C/141V/143A/157G/160L/214V/221Q/268G/273T/311D/312Q/315V/328L/342G/345R/346T/372V, 135G/137N/139C/141V/143A/157G/160L/221Q/268G/273T/311D/312Q/315V/328L/342G/345R/346T/372V/413D, 135G/137A/139L/141V/143A/157G/160L/221Q/233L/268G/273T/279M/311D/312Q/315V/328L/342G/345R/346T/372V, 135G/139C/141V/143A/157G/160L/214V/268G/273T/311D/312Q/315V/328L/342G/345R/346T/372V, 135G/137A/139L/141V/143A/157G/160L/268G/273T/311D/312Q/315V/328L/342G/345R/346T/372V, 135G/137N/139C/141V/143A/157G/160L/S233L/268G/273T/311D/312Q/315V/328L/342G/345R/346T/372V, 135G/137A/139C/141V/143A/157G/160L/268G/273T/311D/312Q/315V/328L/342G/345R/346T/372V, 135G/137N/139C/141V/143A/157G/160L/268G/273T/311D/312Q/315V/328L/342G/345R/346T/372V/413D, 135G/137N/139C/141V/143A/157G/160L/221Q/268G/273T/279K/311D/312Q/315V/328L/342G/345R/346T/372V, 135G/137N/141V/143A/T156V/157G/160L/214V/233L/268G/273T/311D/312Q/315V/328L/342G/345R/346T/372V/413D, or 135G/137N/139L/141V/143A/156V/157G/160L/214V/268G/273T/311D/312Q/315V/328L/342G/345R/346T/372V, wherein the amino acid positions are relative to the reference sequence corresponding to residues 135-413 of SEQ ID NO: 4 or 628, or relative to the reference sequence corresponding to SEQ ID NO: 4 or 628.

[0190] In some embodiments, the amino acid sequence of the engineered protease polypeptide comprises at least a substitution set at amino acid positions 135/137/139/141/143/145/157/160/214/268/273/279/311/312/315/328/342/345/346, 135/137/139/141/143/145/157/160/214/256/268/273/279/311/312/315/328/342/345/346/372, 135/137/139/141/143/157/160/214/221/243/268/273/279/311/312/315/342/345/346, 135/137/139/141/143/157/160/214/268/273/279/311/312/315/328/342/345/346, 135/137/139/141/143/145/157/160/214/221/268/273/279/311/312/315/328/342/345/346/372/406, 135/137/139/141/143/157/160/214/268/273/279/311/312/315/342/345/346/372, 135/137/139/141/143/145/157/160/169/214/268/273/279/311/312/315/328/342/345/372/406, 135/137/139/141/143/157/160/214/256/268/273/279/311/312/315/328/342/345/346/372, 135/137/139/141/143/145/157/160/214/221/268/273/279/311/312/315/342/345/372/406, 135/137/139/141/143/157/160/214/243/268/273/279/311/312/315/328/342/345/346/372, 135/137/139/141/143/145/157/160/214/256/268/273/279/311/312/315/342/345/346, 135/137/139/141/143/157/160/169/214/221/268/273/279/311/312/315/342/345/346/406, 135/137/139/141/143/157/160/214/268/273/279/311/312/315/328/342/345/346/406, 135/137/139/141/143/157/160/169/214/268/273/279/311/312/315/342/345/346/372/406, 135/137/139/141/143/157/160/214/221/268/273/279/311/312/315/328/342/345/346, 135/137/139/141/143/145/157/160/214/221/268/273/279/311/312/315/342/345/346, 135/137/139/141/143/157/160/214/243/268/273/279/311/312/315/342/345/346/372, 135/137/139/141/143/145/157/160/214/268/273/279/311/312/315/328/342/345/346/372, 135/137/139/141/143/157/160/214/256/268/273/279/311/312/315/328/342/345, 135/137/139/141/143/157/160/214/221/268/273/279/311/312/315/328/342/345/346/372/406, 135/137/139/141/143/157/160/169/214/268/273/279/311/312/315/328/342/345/346, 135/137/139/141/143/145/157/160/214/221/268/273/279/311/312/315/328/342/345/346/372, 135/137/139/141/143/145/157/160/214/221/268/273/279/311/312/315/328/342/345, 135/137/139/141/143/157/160/214/243/268/273/279/311/312/315/342/345/346/406, 135/137/139/141/143/145/157/160/169/214/268/273/279/311/312/315/342/345/372, 135/137/139/141/143/145/157/160/214/221/268/273/279/311/312/315/342/345/346/372, 135/137/139/141/143/157/160/169/214/268/273/279/311/312/315/328/342/345/346/372, 135/137/139/141/143/157/160/214/221/268/273/279/311/312/315/342/345/346/372, 135/137/139/141/143/157/160/214/221/268/273/279/311/312/315/328/342/345/346/372, 135/137/139/141/143/145/157/160/214/268/273/279/311/312/315/342/345/346/372, 135/137/139/141/143/157/160/214/268/273/279/311/312/315/328/342/345/372, 135/137/139/141/143/157/160/214/268/273/279/311/312/315/328/342/345/346/372, 135/137/139/141/143/157/160/212/214/268/273/279/311/312/315/328/342/345/346/372, 135/137/139/141/143/145/157/160/214/268/273/279/311/312/315/328/342/345/346/372, 135/137/139/141/143/157/160/179/214/268/273/279/311/312/315/328/342/345/372, 135/137/139/141/143/157/160/214/268/273/279/311/312/315/328/342/345/346/372/375, 135/137/139/141/143/157/160/214/264/268/273/279/311/312/315/328/342/345/346/372, 135/137/139/141/143/157/160/179/214/268/273/279/311/312/315/328/342/345/346/372, 135/137/139/141/143/157/160/185/214/268/273/279/311/312/315/328/342/345/346/372, 135/137/139/141/143/157/160/214/268/273/279/311/312/315/328/342/345/346/372, 135/137/139/141/143/157/160/214/220/268/273/279/311/312/315/328/342/345/346/372, or 135/137/139/141/143/157/160/214/268/273/279/311/312/315/324/328/342/345/346/372, wherein the amino acid positions are relative to the reference sequence corresponding to residues 135-413 of SEQ ID NO: 4 or 628, or relative to the reference sequence corresponding to SEQ ID NO: 4 or 628.

[0191] In some embodiments, the amino acid sequence of the engineered protease polypeptide comprises at least a substitution set or amino acid residue 135G/137N/139L/141V/143A/145E/157G/160L/214P/268G/273L/279M/311D/312Q/315V/328L/342G/T345R/346T, 135G/137N/139L/141V/143A/145E/157G/160L/214P/256M/268G/273L/279M/311D/312Q/315V/328L/342G/345R/346T/372V, 135G/137N/139L/141V/143A/157G/160L/214P/221Q/243L/268G/273L/279M/311D/312Q/315V/342G/345R/346T, 135G/137N/139L/141V/143A/157G/160L/214P/268G/273T/279M/311D/312Q/315V/328L/342G/345R/346T, 135G/137N/139L/141V/143A/145E/157G/160L/214P/221Q/268G/273T/279L/311D/312Q/315V/328L/342G/345R/346T/372V/406R, 135G/137N/139L/141V/143A/157G/160L/214P/268G/273L/279M/311D/312Q/315V/342G/345R/346T/372V, 135G/137N/139L/141V/143A/145E/157G/160L/169S/214P/268G/273L/279M/311D/312Q/315V/328L/342G/345R/372V/406R, 135G/137N/139L/141V/143A/157G/160L/214P/256M/268G/273L/279M/311D/312Q/315V/328L/342G/345R/346T/372V, 135G/137N/139L/141V/143A/145E/157G/160L/214P/221Q/268G/273L/279M/311D/312Q/315V/342G/345R/372V/406R, 135G/137N/139L/141V/143A/157G/160L/214P/243L/268G/273L/279M/311D/312Q/315V/328L/342G/345R/346T/372V, 135G/137N/139L/141V/143A/145E/157G/160L/214V/256M/268G/273L/279L/311D/312Q/315V/342G/345R/346T, 135G/137N/139L/141V/143A/157G/160L/T169S/214P/221Q/268G/273T/279M/311D/312Q/315V/342G/345R/346T/406R, 135G/137N/139L/141V/143A/157G/160L/214P/268G/273T/279M/311D/312Q/315V/328L/342G/345R/346T/406R, 135G/137N/139L/141V/143A/157G/160L/169S/214P/268G/273T/279M/311D/312Q/315V/342G/345R/346T/372V/406R, 135G/137N/139L/141V/143A/157G/160L/214P/221Q/268G/273T/279M/311D/312Q/315V/328L/342G/345R/346T, 135G/137N/139L/141V/143A/145E/157G/160L/214P/221Q/268G/273T/279L/311D/312Q/315V/342G/345R/346T, 135G/137N/139L/141V/143A/157G/160L/214V/243L/268G/273L/279M/311D/312Q/315V/342G/345R/346T/372V, 135G/137N/139L/141V/143A/145E/157G/160L/214P/221Q/268G/273T/279M/311D/312Q/315V/328L/342G/345R/346T/372V, 135G/137N/139L/141V/143A/157G/160L/214V/256M/268G/273L/279M/311D/312Q/315V/328L/342G/345R, 135G/137N/139L/141V/143A/157G/160L/214P/221Q/268G/273T/279M/311D/312Q/315V/328L/342G/345R/346T/372V/406R, 135G/137N/139L/141V/143A/157G/160L/T169S/214P/268G/273T/279M/311D/312Q/315V/328L/342G/345R/346T, 135G/137N/139L/141V/143A/145E/157G/160L/214V/221Q/268G/273L/279M/311D/312Q/315V/328L/342G/345R/346T/372V, 135G/137N/139L/141V/143A/145E/157G/160L/214P/221Q/268G/273T/279M/311D/312Q/315V/328L/342G/345R, 135G/137N/139L/141V/143A/157G/160L/214P/243L/268G/273L/279M/311D/312Q/315V/342G/345R/346T/406R, 135G/137N/139L/141V/143A/145E/157G/160L/169S/214P/268G/273L/279M/311D/312Q/315V/342G/345R/372V, 135G/137N/139L/141V/143A/157G/160L/214P/268G/273T/279M/311D/312Q/315V/342G/345R/346T/372V, 135G/137N/139L/141V/143A/157G/160L/169S/214P/268G/273L/279M/311D/312Q/315V/328L/342G/345R/346T, 135G/137N/139L/141V/143A/145E/157G/160L/214P/221Q/268G/273T/279M/311D/312Q/315V/342G/345R/346T/372V, 135G/137N/139L/141V/143A/157G/160L/169S/214V/268G/273L/279M/311D/312Q/315V/328L/342G/345R/346T/372V, 135G/137N/139L/141V/143A/157G/160L/214P/221Q/268G/273L/279M/311D/312Q/315V/342G/345R/346T/372V, 135G/137N/139L/141V/143A/157G/160L/214P/221Q/268G/273T/279M/311D/312Q/315V/328L/342G/345R/346T/372V, 135G/137N/139L/141V/143A/145E/157G/160L/214P/268G/273T/279M/311D/312Q/315V/342G/345R/346T/372V, 135G/137N/139L/141V/143A/157G/160L/214N/268G/273T/279M/311D/312Q/315V/328L/342G/345R/372V, 135G/137N/139L/141V/143A/157G/160L/214P/268G/273T/279M/311D/312R/315V/328L/342G/345R/346T/372V, 135G/137N/139L/141V/143A/157G/160L/212S/214P/268G/273T/279M/311D/312Q/315V/328L/342G/345R/346T/372V, 135G/137N/139L/141V/143A/157G/160L/214P/268G/273T/279K/311D/312Q/315V/328L/342G/345R/346T/372V, 135G/137N/139L/141V/143A/157G/160L/212S/214P/268G/273T/279M/311D/312R/315V/328L/342G/345R/346T/372V, 135G/137N/139L/141V/143A/145E/157G/160L/214P/268G/273T/279M/311D/312Q/315V/328L/342G/345R/346T/372V, 135G/137N/139L/141V/143A/157G/160L/179S/214P/268G/273T/279M/311D/312Q/315V/328L/342G/345R/372V, 135G/137N/139L/141V/143A/157G/160L/214N/268G/273T/279M/311D/312Q/315V/328L/342G/345R/346T/372V, 135G/137N/139L/141V/143A/157G/160L/214P/268G/273T/279M/311D/312Q/315V/328L/342G/345R/372V, 135G/137N/139L/141V/143A/157G/160L/214P/268G/273T/279M/311D/312Q/315R/328L/342G/345R/346T/372Y, 135G/137N/139L/141V/143A/157G/160L/214P/268G/273T/279M/311D/312Q/315V/328L/342G/345R/346T/372Y, 135G/137N/139L/141V/143A/157G/160L/214P/268G/273T/279M/311D/312Q/315V/328L/342G/345R/346T/372V/375A, 135G/137N/139L/141V/143A/157G/160L/214P/264F/268G/273T/279M/311D/312Q/315V/328L/342G/345R/346T/372V, 135G/137N/139L/141V/143A/157G/160L/179S/214P/268G/273T/279M/311D/312Q/315V/328L/342G/345R/346T/372V, 135G/137N/139L/141V/143A/157G/160L/185T/214P/268G/273T/279M/311D/312Q/315V/328L/342G/345R/346T/372V, 135G/137N/139L/141V/143A/157G/160L/214P/268G/273T/279M/311D/312Q/315V/328L/342G/345R/346T/372V, 135G/137N/139L/141V/143A/157G/160L/214P/220R/268G/273T/279M/311D/312Q/315V/328L/342G/345R/346T/372Y, 135G/137N/139L/141V/143A/157G/160L/214P/268G/273T/279M/311D/312Q/315V/324D/328L/342G/345R/346T/372V, or 135G/137N/139L/141V/143A/145E/157G/160L/214P/221Q/268G/273L/279M/311D/312Q/315V/342G/345R/346T, wherein the amino acid positions are relative to the reference sequence corresponding to residues 135-413 of SEQ ID NO: 4 or 628, or relative to the reference sequence corresponding to SEQ ID NO: 4 or 628.

[0192] In some embodiments, the amino acid sequence of the engineered protease polypeptide comprises at least a substitution at an amino acid position set forth in Tables 3.1, 3.2, 4.1, 4.2, 5.1, 5.2, 6.1, 7.1, 8.1, and 9.1, wherein the amino acid positions are relative to the reference sequence corresponding to residues 135-413 of SEQ ID NO: 4 or 628, or relative to the reference sequence corresponding to SEQ ID NO: 4 or 628.

[0193] In some embodiments, the amino acid sequence of the engineered protease polypeptide comprises at least a substitution set forth in Tables 3.1, 3.2, 4.1, 4.2, 5.1, 5.2, 6.1, 7.1, 8.1, and 9.1, wherein the amino acid positions are relative to the reference sequence corresponding to residues 135-413 of SEQ ID NO: 4 or 628, or relative to the reference sequence corresponding to SEQ ID NO: 4 or 628.

[0194] In some embodiments, the amino acid sequence of the engineered protease polypeptide comprises at least a substitution or substitution set at amino acid position(s) set forth in Tables 3.1, 3.2, 4.1, 4.2, 5.1, 5.2, 6.1, 7.1, 8.1, and 9.1, wherein the amino acid positions are relative to the reference sequence corresponding to residues 135-413 of SEQ ID NO: 4 or 628, or relative to the reference sequence corresponding to SEQ ID NO: 4 or 628.

[0195] In some embodiments, the amino acid sequence of the engineered protease polypeptide comprises at least a substitution or substitution set of an engineered protease polypeptide variant set forth in Tables 3.1, 3.2, 4.1, 4.2, 5.1, 5.2, 6.1, 7.1, 8.1, and 9.1, wherein the amino acid positions are relative to the reference sequence corresponding to residues 135-413 of SEQ ID NO: 4 or 628, or relative to the reference sequence corresponding to SEQ ID NO: 4 or 628.

[0196] In some embodiments, the engineered protease polypeptide comprises an amino acid sequence having at least 70%, 75%, 80%, 81%, 82%, 83%, 84%, 85%, 86%, 87%, 88%, 89%, 90%, 91%, 92%, 93%, 94%, 95%, 96%, 97%, 98%, or 99%, or more sequence identity to a reference sequence corresponding to an amino acid sequence comprising at least a substitution or substitution set of an engineered protease polypeptide set forth in Tables 3.1, 3.2, 4.1, 4.2, 5.1, 5.2, 6.1, 7.1, 8.1, and 9.1, wherein the amino acid positions are relative to the reference sequence corresponding to residues 135-413 of SEQ ID NO: 4 or 628, or relative to the reference sequence corresponding to SEQ ID NO: 4 or 628.

[0197] In some embodiments, the engineered protease polypeptide comprises an amino acid sequence having at least 70%, 75%, 80%, 81%, 82%, 83%, 84%, 85%, 86%, 87%, 88%, 89%, 90%, 91%, 92%, 93%, 94%, 95%, 96%, 97%, 98%, or 99%, or more sequence identity to the reference sequence corresponding to residues 135-413 of SEQ ID NO: 948, 1126, 1368, or 1548, or to the reference sequence corresponding to SEQ ID NO: 948, 1126, 1368, or 1548.

[0198] In some embodiments, the engineered protease polypeptide comprises an amino acid sequence having at least 70%, 75%, 80%, 81%, 82%, 83%, 84%, 85%, 86%, 87%, 88%, 89%, 90%, 91%, 92%, 93%, 94%, 95%, 96%, 97%, 98%, or 99%, or more sequence identity to a reference sequence corresponding to residues 135-413 of an even-numbered SEQ ID NO. of SEQ ID NOs: 6-2242, or to a reference sequence corresponding to an even-numbered SEQ ID NO. of SEQ ID NOs: 6-2242.

[0199] In some embodiments, the engineered protease polypeptide comprises an amino acid sequence having at least 70%, 75%, 80%, 81%, 82%, 83%, 84%, 85%, 86%, 87%, 88%, 89%, 90%, 91%, 92%, 93%, 94%, 95%, 96%, 97%, 98%, or 99%, or more sequence identity to the reference sequence corresponding to residues 135-413 of an even-numbered SEQ ID NO. of SEQ ID NOs: 6-2242, or to the reference sequence corresponding to an even-numbered SEQ ID NO. of SEQ ID NOs: 6-2242, wherein the amino acid sequence comprises one or more substitutions relative to the reference sequence corresponding to residues 135-413 of SEQ ID NO: 948, 1126, 1368, or 1548, or relative to the reference sequence corresponding to SEQ ID NO: 948, 1126, 1368, or 1548.

[0200] In some embodiments, the engineered protease polypeptide comprises an amino acid sequence having at least 70%, 75%, 80%, 81%, 82%, 83%, 84%, 85%, 86%, 87%, 88%, 89%, 90%, 91%, 92%, 93%, 94%, 95%, 96%, 97%, 98%, or 99%, or more sequence identity to the reference sequence corresponding to residues 135-413 of SEQ ID NO: 948, 1126, 1368, or 1548, or to the reference sequence corresponding to SEQ ID NO: 948, 1126, 1368, or 1548, wherein the amino acid sequence comprises one or more substitutions relative to the reference sequence corresponding to residues 135-413 of SEQ ID NO: 948, 1126, 1368, or 1548, or relative to the reference sequence corresponding to SEQ ID NO: 948, 1126, 1368, or 1548.

[0201] In some embodiments, the amino acid sequence of the engineered protease polypeptide comprises at least a substitution at amino acid position 11, 31, 42, 45, 50, 53, 84, 99, 100, 126, 128, 129, 130, 131, 132, 134, 135, 136, 137, 138, 139, 140, 141, 143, 145, 151, 154, 156, 157, 159, 160, 161, 162, 163, 169, 172, 173, 174, 179, 180, 184, 185, 186, 187, 188, 190, 191, 192, 193, 194, 198, 199, 212, 214, 220, 221, 222, 223, 225, 231, 232, 233, 235, 237, 238, 239, 240, 242, 243, 245, 246, 249, 250, 251, 252, 253, 254, 256, 258, 262, 263, 264, 265, 266, 267, 268, 269, 271, 273, 274, 275, 277, 278, 279, 280, 281, 283, 285, 290, 292, 293, 294, 296, 297, 300, 302, 303, 311, 312, 313, 314, 315, 316, 318, 324, 328, 336, 339, 341, 342, 343, 345, 346, 355, 358, 360, 364, 367, 368, 369, 370, 371, 372, 373, 374, 375, 377, 381, 382, 384, 386, 389, 391, 392, 401, 402, 405, 406, 409, 410, 411, 412, or 413, or combinations thereof, wherein the amino acid positions are relative to the reference sequence corresponding to residues 135-413 of SEQ ID NO: 948, 1126, 1368, or 1548, or relative to the reference sequence corresponding to SEQ ID NO: 948, 1126, 1368, or 1548.

[0202] In some embodiments, the amino acid sequence of the engineered protease polypeptide comprises at least a substitution or amino acid residue 11K, 31G, 42W, 45Y, 50R, 53A, 84M, 99V, 100V, 126T, 128G/I/K/L/P/R/S/T/V, 129E/F/H/I/K/L/R/S/T/V, 130A/F/G/N/V, 131E/P/R/T/V/Y, 132A/C/D/E/G/P/R/V/Y, 134A/C/D/E/G/I/L/M/N/P/S/T/V/W/Y, 135A/C/E/G/H/I/K/L/M/N/P/R/S/T/V/W/Y, 136C/G/I/M, 137A/D/N/S, 138Q, 139C/D/E/F/H/I/K/L/M/N/R/S, 140L, 141A/C/D/E/F/G/H/I/L/M/N/Q/R/S/T/V/W/Y, 143A/C/D/H/N/Q/S/T, 145A/C/D/E/F/G/H/I/K/L/P/Q/R/S/T/V/W, 151D/Q, 154C/D/L/R, 156C/V, 157A/C/D/E/F/G/H/I/K/L/M/N/P/Q/R/S/T/V/W, 159G, 160A/C/D/E/F/K/L/M/N/P/R/Q/S/T/V/W/Y, 161D/E/G/L/R, 162I, 163H/L, 169S, 172Q, 173F/S, 174L, 179K/S, 180H/L/M, 184A/D/G/L/M/Q/R, 185A/D/E/F/G/L/M/P/Q/R/S/T/V, 186A/R/S/T/Y, 187A, 188A/C/D/F/G/L/M/S/T/W, 190S, 191R, 192C/D/M/N, 193T, 194A/D/L/T, 198G, 199C/K/L, 212S, 214A/C/D/E/F/G/H/I/K/L/M/N/P/Q/R/T/V/W/Y, 220K/L/R, 221A/C/D/E/F/G/H/I/K/L/M/P/Q/R/T/V/W/Y, 222G, 223S, 225V, 231H/V, 232S, 233G/I/L, 235Q/R/V, 237A/G, 238Q, 239L/M, 240A/L, 242E/S, 243E/L/M/R/S/T, 245L/V, 246I/V, 249G/M/S, 250A/C/F/L/N/T, 251D/S/T, 252P, 253C/I/V, 254C/E, 256L/M, 258W, 262A/S, 263E/H/P/Q/R/S, 264A/C/F/I/L/N/P/R/T/V, 265C/G/R, 266H/T/Y, 267A/G/H/I/L/M/R/S/T/V/W, 268A/F/G/H/I/N/P/Q/S/T/V/Y, 269Q/T, 271A, 273A/C/F/L/M/S/T/V, 274A/G/K/L/T/V/W, 275A/V, 277D/G, 278L/N/S/V/Y, 279A/E/F/G/H/K/L/M/R/S/T/Y/V/W, 280D/K/S/T, 281C/V, 283M, 285S, 290E/G/S, 292V, 293A, 294V/W, 296M/R, 297F, 300R/V, 302G/P, 303A/V, 311A/E/D/G/K/M/Q/S/T, 312A/C/D/E/G/H/I/K/L/M/N/P/Q/R/S/T/V/W/Y, 313A/Q/S/T, 314G, 315A/C/D/E/F/G/H/I/K/L/M/Q/R/S/T/V/W/Y, 316K, 318N/P/R, 324A/D/E/I/R/V/W/Y, 328L/M/V, 336F, 339S/W, 341G, 342A/C/D/E/F/G/I/K/M/N/P/R/Q/S/T/V/W/Y, 343S, 345A/C/D/E/F/G/I/K/L/M/Q/R/S/V/W/Y, 346A/C/D/F/G/K/L/M/N/P/Q/R/S/T/V/W/Y, 355A, 358S, 360S, 364A/V, 367V, 368G/T, 369I/V/W, 370C/E/F/G/I/K/L/P/Q/R/S/V, 371L, 372A/C/F/L/R/S/V/Y, 373A/C/E/F/M/S/Y, 374E/G/L/R/S/W/Y, 375A/E/I/L/M/S/T/V, 377H, 381N, 382G/R/S/T, 384C, 386P/W, 389C/P, 391L/S, 392Y, 401L, 402G/*, 405L/Q, 406C/M/R/W, 409E/R/*, 410C/I/W/*, 411L/R/T/V, 412P/T/*, or 413A/C/D/S/*, or combinations thereof, wherein the amino acid positions are relative to the reference sequence corresponding to residues 135-413 of SEQ ID NO: 948, 1126, 1368, or 1548, or relative to the reference sequence corresponding to SEQ ID NO: 948, 1126, 1368, or 1548.

[0203] In some embodiments, the amino acid sequence of the engineered protease polypeptide comprises at least a substitution at amino acid position 135, 137, 139, 141, 143, 157, 160, 214, 268, 273, 279, 311, 312, 315, 328, 342, 345, 346, or 372, or combinations thereof, wherein the amino acid positions are relative to the reference sequence corresponding to residues 135-413 of SEQ ID NO: 948, 1126, 1368, or 1548, or relative to the reference sequence corresponding to SEQ ID NO: 948, 1126, 1368, or 1548.

[0204] In some embodiments, the amino acid sequence of the engineered protease polypeptide comprises at least a substitution or amino acid residue 135A/C/E/G/H/I/K/L/M/N/P/R/S/T/V/W/Y, 137A/D/N/S, 139C/D/E/F/H/I/K/L/M/N/R/S, 141A/C/D/E/F/G/H/I/L/M/N/Q/R/S/T/V/W/Y, 143A/C/D/H/N/Q/S/T, 157A/C/D/E/F/G/H/I/K/L/M/N/P/Q/R/S/T/V/W, 160A/C/D/E/F/K/L/M/N/P/R/Q/S/T/V/W/Y, 214A/C/D/E/F/G/H/I/K/L/M/N/P/Q/R/T/V/W/Y, 268A/F/G/H/I/N/P/Q/S/T/V/Y, 273A/C/F/L/M/S/T/V, 279A/E/F/G/H/K/L/M/R/S/T/Y/V/W, 311A/E/D/G/K/M/Q/S/T, 312A/C/D/E/G/H/I/K/L/M/N/P/Q/R/S/T/V/W/Y, 315A/C/D/E/F/G/H/I/K/L/M/Q/R/S/T/V/W/Y, 328L/M/V, 342A/C/D/E/F/G/I/K/M/N/P/R/Q/S/T/V/W/Y, 345A/C/D/E/F/G/I/K/L/M/Q/R/S/V/W/Y, 346A/C/D/F/G/K/L/M/N/P/Q/R/S/T/V/W/Y, or 372A/C/F/L/R/S/V/Y, or combinations thereof, wherein the amino acid positions are relative to the reference sequence corresponding to residues 135-413 of SEQ ID NO: 948, 1126, 1368, or 1548, or relative to the reference sequence corresponding to SEQ ID NO: 948, 1126, 1368, or 1548.

[0205] In some embodiments, the amino acid sequence of the engineered protease polypeptide comprises at least a substitution or amino acid residue 135G, 137N, 139L/C, 141V, 143A, 157G, 160L, 214P, 268G, 273T, 279M, 311D, 312Q, 315V, 328L, 342G, 345R, 346T, or 372V, or combinations thereof, wherein the amino acid positions are relative to the reference sequence corresponding to residues 135-413 of SEQ ID NO: 948, 1126, 1368, or 1548, or relative to the reference sequence corresponding to SEQ ID NO: 948, 1126, 1368, or 1548.

[0206] In some embodiments, the engineered protease polypeptide comprises an amino acid sequence having at least 70%, 75%, 80%, 81%, 82%, 83%, 84%, 85%, 86%, 87%, 88%, 89%, 90%, 91%, 92%, 93%, 94%, 95%, 96%, 97%, 98%, or 99%, or more sequence identity to the reference sequence corresponding to residues 135-413 of SEQ ID NO: 948, or to the reference sequence corresponding to SEQ ID NO: 948, wherein the amino acid sequence comprises one or more substitutions relative to the reference sequence corresponding to residues 135-413 of SEQ ID NO: 948, or relative to the reference sequence corresponding to SEQ ID NO: 948.

[0207] In some embodiments, the engineered protease polypeptide of comprises an amino acid sequence having at least 70%, 75%, 80%, 81%, 82%, 83%, 84%, 85%, 86%, 87%, 88%, 89%, 90%, 91%, 92%, 93%, 94%, 95%, 96%, 97%, 98%, or 99%, or more sequence identity to a reference sequence corresponding to residues 135-413 of an even-numbered SEQ ID NO. of SEQ ID NOs: 950-1154, or to a reference sequence corresponding to an even-numbered SEQ ID NO. of SEQ ID NOs: 950-1154, wherein the amino acid sequence comprises one or more substitutions relative to the reference sequence corresponding to residues 135-413 of SEQ ID NO: 948, or relative to the reference sequence corresponding to SEQ ID NO: 948.

[0208] In some embodiments, the amino acid sequence of the engineered protease polypeptide comprises at least a substitution or substitution set at amino acid position(s) 411, 402, 285, 245, 266, 355, 258, 222, 140, 268, 225, 283, 406, 410, 143/145/243/312, 139/143/145/157/312, 139/157/345, 139/269, 156/157/342/346, 139/143, 269, 139/243/328, 269/328, 143/145/169, 328, 143/145/262, 145/262/312/328, 139/156/157, 139/145/312, 312, 139, 139/312, 139/156, 139/143/145/243, 145/157, 145/346, 145/262/312/328/345/346, 145/262, 312/342, 143/243, 139/345, 342, 143/145/262/342, 139/143/169, 139/143/145/312, 169, 139/145/262/312/328/342/345/346, 139/328, 139/243, 139/143/328, 139/143/243, 139/145, 145/312, 145/169, 139/143/157/312, 84/139/143, 145/269, 143/145/157/269/312/328, 143/145/269, 157, 139/143/312, 256, 273, 409, 172, 401, 281, 253, 143/145/243/328, 145, 139/143/145/328/342/345, 143/328/342/345, 145/342/345, 143, 139/145/328/342/345, 143/145/169/312/328/345/346, 143/243/328/342/345/346, 139/143/157/169/328/346, 143/145/156/312/328, 139/145/157/312/328, 143/328/342/345/346, 143/145, 143/145/312/342/345, or 143/145/328, wherein the amino acid positions are relative to the reference sequence corresponding to residues 135-413 of SEQ ID NO: 948, or relative to the reference sequence corresponding to SEQ ID NO: 948.

[0209] In some embodiments, the amino acid sequence of the engineered protease polypeptide comprises at least a substitution or substitution set, or amino acid residue(s) 411V, 411R, 402G, 285S, 245V, 266H, 355A, 258W, 222G, 140L, 268T, 411L, 225V, 245L, 283M, 406W, 410C, 406C, 143A/145E/243L/312I, 139L/143A/145E/157G/312I, 139C/157G/345R, 139C/269Q, 156V/157G/342G/346T, 139L/143A, 269Q, 139L/243L/328L, 269Q/328L, 143A/145E/169S, 328L, 143A/145E/262S, 145E/262S/312I/328L, 139L/156V/157G, 139C/145E/312I, 312I, 139C, 139C/312I, 139C/156V, 139C/143A/145E/243L, 145E/157G, 145E/346T, 145E/262A/312I/328L/345R/346T, 145E/262A, 312I/342G, 143A/243L, 139C/345R, 342G, 143A/145E/262S/342G, 139L/143A/169S, 139C/143A/145E/312I, 169S, 139L/145E/262A/312I/328L/342G/345R/346T, 139C/328L, 139L/243L, 139L/143A/328L, 139L, 139C/143A/243L, 139C/145E, 145E/312I, 145E/169S, 139C/143A/157G/312I, 84M/139C/143A, 145E/269Q, 143A/145E/157G/269Q/312I/328L, 143A/145E/269Q, 157G, or 139L/143A/312I, wherein the amino acid positions are relative to the reference sequence corresponding to residues 135-413 of SEQ ID NO: 948, or relative to the reference sequence corresponding to SEQ ID NO: 948.

[0210] In some embodiments, the amino acid sequence of the engineered protease polypeptide comprises at least a substitution or substitution set S411V, S411R, A402G, A285S, I245V, N266H, P355A, M258W, A222G, Q140L, S268T, S411L, 1225V, 1245L, V283M, A406W, G410C, A406C, H143A/N145E/Q243L/S312I, N139L/H143A/N145E/S157G/S312I, N139C/S157G/T345R, N139C/M269Q, T156V/S157G/S342G/S346T, N139L/H143A, M269Q, N139L/Q243L/V328L, M269Q/V328L, H143A/N145E/T169S, V328L, H143A/N145E/G262S, N145E/G262S/S312I/V328L, N139L/T156V/S157G, N139C/N145E/S312I, S312I, N139C, N139C/S312I, N139C/T156V, N139C/H143A/N145E/Q243L, N145E/S157G, N145E/S346T, N145E/G262A/S312I/V328L/T345R/S346T, N145E/G262A, S312I/S342G, H143A/Q243L, N139C/T345R, S342G, H143A/N145E/G262S/S342G, N139L/H143A/T169S, N139C/H143A/N145E/S312I, T169S, N139L/N145E/G262A/S312I/V328L/S342G/T345R/S346T, N139C/V328L, N139L/Q243L, N139L/H143A/V328L, N139L, N139C/H143A/Q243L, N139C/N145E, N145E/S312I, N145E/T169S, N139C/H143A/S157G/S312I, V84M/N139C/H143A, N145E/M269Q, H143A/N145E/S157G/M269Q/S312I/V328L, H143A/N145E/M269Q, S157G, or N139L/H143A/S312I, wherein the amino acid positions are relative to the reference sequence corresponding to residues 135-413 of SEQ ID NO: 948, or relative to the reference sequence corresponding to SEQ ID NO: 948.

[0211] In some embodiments, the amino acid sequence of the engineered protease polypeptide comprises at least a substitution or substitution set, or amino acid residue(s) 256L, 411T, 273F, 409E, 268G, 172Q, 409R, 401L, 281C, 410W, 253V, 406M, 273T, 406R, 256M, 410I, 273M, 273L, 143A/145E/243L/328L, 145E, 139C/143A/145E/328L/342G/345R, 139L/145E, 143A/328L/342G/345R, 145E/342G/345R, 143A, 139C/143A, 139C/145E/328L/342G/345R, 143A/145E/169S/312I/328L/345R/346T, 143A/243L/328L/342G/345R/346T, 139C/143A/157G/169S/328L/346T, 143A/145E/156V/312I/328L, 139C/145E/157G/312I/328L, 143A/328L/342G/345R/346T, 139C/143A/328L, 143A/145E, 143A/145E/312I/342G/345R, or 143A/145E/328L, wherein the amino acid positions are relative to the reference sequence corresponding to residues 135-413 of SEQ ID NO: 948, or relative to the reference sequence corresponding to SEQ ID NO: 948.

[0212] In some embodiments, the amino acid sequence of the engineered protease polypeptide comprises at least a substitution or substitution set I256L, S411T, V273F, G409E, S268G, D172Q, G409R, H401L, T281C, G410W, A253V, A406M, V273T, A406R, 1256M, G410I, V273M, V273L, H143A/N145E/Q243L/V328L, N145E, N139C/H143A/N145E/V328L/S342G/T345R, N139L/N145E, H143A/V328L/S342G/T345R, N145E/S342G/T345R, H143A, N139C/H143A, N139C/N145E/V328L/S342G/T345R, H143A/N145E/T169S/S312I/V328L/T345R/S346T, H143A/Q243L/V328L/S342G/T345R/S346T, N139C/H143A/S157G/T169S/V328L/S346T, H143A/N145E/T156V/S312I/V328L, N139C/N145E/S157G/S312I/V328L, H143A/V328L/S342G/T345R/S346T, N139C/H143A/V328L, H143A/N145E, H143A/N145E/S312I/S342G/T345R, or H143A/N145E/V328L, wherein the amino acid positions are relative to the reference sequence corresponding to residues 135-413 of SEQ ID NO: 948, or relative to the reference sequence corresponding to SEQ ID NO: 948.

[0213] In some embodiments, the engineered protease polypeptide comprises an amino acid sequence having at least 70%, 75%, 80%, 81%, 82%, 83%, 84%, 85%, 86%, 87%, 88%, 89%, 90%, 91%, 92%, 93%, 94%, 95%, 96%, 97%, 98%, or 99%, or more sequence identity to the reference sequence corresponding to residues 135-413 of SEQ ID NO: 1126, or to the reference sequence corresponding to SEQ ID NO: 1126, wherein the amino acid sequence comprises one or more substitutions relative to the reference sequence corresponding to residues 135-413 of SEQ ID NO: 1126, or relative to the reference sequence corresponding to SEQ ID NO: 1126.

[0214] In some embodiments, the engineered protease polypeptide comprises an amino acid sequence having at least 70%, 75%, 80%, 81%, 82%, 83%, 84%, 85%, 86%, 87%, 88%, 89%, 90%, 91%, 92%, 93%, 94%, 95%, 96%, 97%, 98%, or 99%, or more sequence identity to a reference sequence corresponding to residues 135-413 of an even-numbered SEQ ID NO. of SEQ ID NOs: 1156-1422, or to a reference sequence corresponding to an even-numbered SEQ ID NO. of SEQ ID NOs: 1156-1422, wherein the amino acid sequence comprises one or more substitutions relative to the reference sequence corresponding to residues 135-413 of SEQ ID NO: 1126, or relative to the reference sequence corresponding to SEQ ID NO: 1126.

[0215] In some embodiments, the amino acid sequence of the engineered protease polypeptide comprises at least a substitution or substitution set at amino acid position(s), or amino acid residue(s) 279, 250, 154, 214, 249, 275, 137, 161, 180, 174, 139, 254, 145, 278, 136, 154/413, 294, 237, 274, 264, 185, 277, 293, 233, 173, 312, 302, 238, 135, 221, 290, 263, 267, 239, 163, 292, 246, 243, 235, 156, 223, 278/413, 297, 194, 251, 253/411, 145/157/253/268/273/281/312/346/411, 139/346, 253, 346/411, 253/346, 312/346, 273/312, 253/281, 157/253/273/312/346/411, 139/157/253/268/273/281/312/346, 253/273/411, 139/253/268/273/281, 139/157/411, 157, 273, 139/253/268/273/281/312/411, 157/253/411, 139/145/253/346, 139/157/253/273/312, 139/157/268/273/312/346, 157/273/312/346, 139/411, 139/253/268/273/281/312/346/411, 157/273/346/411, 139/145/157/162/253/273/281/312, 139/253/273/281/312, 157/253/268/273/281/312, 139/253/268, 139/157/312, 253/273/281/346, 157/253/312/346/411, 157/273/312/346/411, 139/145/157/253/268/281/312, 139/273/312/346, 157/253/268/273/312/346, 139/268/346, 268/273/312/346, 139/157/253/268/273/312, 139/157/253, 139/253/281, 139/157/253/268/273, 253/312/411, or 139/268/273, wherein the amino acid positions are relative to the reference sequence corresponding to residues 135-413 of SEQ ID NO: 1126, or relative to the reference sequence corresponding to SEQ ID NO: 1126.

[0216] In some embodiments, the amino acid sequence of the engineered protease polypeptide comprises at least a substitution or substitution set, or amino acid residue(s) 279Y, 250T, 154C, 214Y, 249S, 275A, 137A, 161D, 180H, 174L, 139K, 254C, 145E, 278V, 136M, 154L/413D, 294V, 154R, 237A, 274G, 137N, 264P, 274T, 278N, 214A, 185G, 214V, 279T, 277G, 264I, 293A, 233L, 278Y, 173F, 274L, 312C, 279L, 302G, 238Q, 294W, 135A, 221E, 290S, 278S, 263Q, 263H, 278L, 263E, 154L, 139M, 137S, 233G, 139F, 267I, 221L, 173S, 302P, 221V, 239M, 290G, 163H, 292V, 246V, 214N, 243S, 233I, 235Q, 145D, 274V, 279M, 185S, 279K, 145W, 290E, 214P, 156V, 156C, 223S, 278V/413D, 250C, 267S, 297F, 221Q, 194D, 251T, 253V/411T, 145P/157R/253I/268G/273T/281V/312Q/346T/411T, 139C/346A, 253V, 346T/41 IT, 253V/346T, 139C/346T, 312Q/346T, 273T/312Q, 253I/281V, 157R/253V/273T/312Q/346T/411T, 139C/157K/253V/268G/273F/281V/312Q/346A, 253V/273T/411T, 139C/253I/268F/273T/281V, 139C/157R/411T, 157G, 273T, 139C/253V/268G/273F/281V/312Q/411T, 157G/253V/411T, 139C/145E/253V/346T, 139C/157K/253V/273T/312Q, 139C/157G/268G/273T/312Q/346T, 157G/273T/312Q/346T, 139C/411T, 139C/253V/268G/273F/281C/312I/346T/411T, 157K/273F/346T/411T, 139C/145E/157G/162I/253V/273F/281V/312Q, 139C/253V/273T/281C/312Q, 157G/253V/268F/273F/281V/312Q, 139C/253I/268F, 139C/157R/312Q, 253V/273T/281C/346T, 157K/253V/312I/346T/411T, 157R/273T/312Q/346T/411T, 139C/145E/157K/253V/268G/281C/312Q, 139C/273T/312Q/346T, 157K/253V/268F/273T/312I/346T, 139C/268G/346T, 157K, 268G/273F/312Q/346T, 139C/157K/253V/268F/273F/312Q, 157K/273T/312Q/346T, 139C/157G/253V, 139C, 139C/253V/281V, 139C/157G/253V/268G/273T, 253V/312Q/411T, 139C/268G/273T, or 253I, wherein the amino acid positions are relative to the reference sequence corresponding to residues 135-413 of SEQ ID NO: 1126, or relative to the reference sequence corresponding to SEQ ID NO: 1126.

[0217] In some embodiments, the amino acid sequence of the engineered protease polypeptide comprises at least a substitution or substitution set Q279Y, D250T, A154C, S214Y, A249S, T275A, H137A, S161D, N180H, N174L, N139K, D254C, N145E, A278V, V136M, A154L/G413D, S294V, A154R, S237A, Q274G, H137N, G264P, Q274T, A278N, S214A, N185G, S214V, Q279T, V277G, G264I, S293A, S233L, A278Y, H173F, Q274L, S312C, Q279L, S302G, L238Q, S294W, G135A, S221E, D290S, A278S, G263Q, G263H, A278L, G263E, A154L, N139M, H137S, S233G, N139F, Q267I, S221L, H173S, S302P, S221V, Y239M, D290G, K163H, A292V, L246V, S214N, Q243S, S233I, S235Q, N145D, Q274V, Q279M, N185S, Q279K, N145W, D290E, S214P, T156V, T156C, T223S, A278V/G413D, D250C, Q267S, Y297F, S221Q, N194D, 1251T, A253V/S411T, N145P/S157R/A253I/S268G/V273T/T281V/S312Q/S346T/S411T, N139C/S346A, A253V, S346T/S411T, A253V/S346T, N139C/S346T, S312Q/S346T, V273T/S312Q, A253I/T281V, S157R/A253V/V273T/S312Q/S346T/S411T, N139C/S157K/A253V/S268G/V273F/T281V/S312Q/S346A, A253V/V273T/S411T, N139C/A253I/S268F/V273T/T281V, N139C/S157R/S411T, S157G, V273T, N139C/A253V/S268G/V273F/T281V/S312Q/S411T, S157G/A253V/S411T, N139C/N145E/A253V/S346T, N139C/S157K/A253V/V273T/S312Q, N139C/S157G/S268G/V273T/S312Q/S346T, S157G/V273T/S312Q/S346T, N139C/S411T, N139C/A253V/S268G/V273F/T281C/S312I/S346T/S411T, S157K/V273F/S346T/S411T, N139C/N145E/S157G/V162I/A253V/V273F/T281V/S312Q, N139C/A253V/V273T/T281C/S312Q, S157G/A253V/S268F/V273F/T281V/S312Q, N139C/A253I/S268F, N139C/S157R/S312Q, A253V/V273T/T281C/S346T, S157K/A253V/S3I2I/S346T/S411T, S157R/V273T/S312Q/S346T/S411T, N139C/N145E/S157K/A253V/S268G/T281C/S312Q, N139C/V273T/S312Q/S346T, S157K/A253V/S268F/V273T/S312I/S346T, N139C/S268G/S346T, S157K, S268G/V273F/S312Q/S346T, N139C/S157K/A253V/S268F/V273F/S312Q, S157K/V273T/S312Q/S346T, N139C/S157G/A253V, N139C, N139C/A253V/T281V, N139C/S157G/A253V/S268G/V273T, A253V/S312Q/S411T, N139C/S268G/V273T, or A253I, wherein the amino acid positions are relative to the reference sequence corresponding to residues 135-413 of SEQ ID NO: 1126, or relative to the reference sequence corresponding to SEQ ID NO: 1126.

[0218] In some embodiments, the engineered protease polypeptide comprises an amino acid sequence having at least 70%, 75%, 80%, 81%, 82%, 83%, 84%, 85%, 86%, 87%, 88%, 89%, 90%, 91%, 92%, 93%, 94%, 95%, 96%, 97%, 98%, or 99%, or more sequence identity to the reference sequence corresponding to residues 135-413 of SEQ ID NO: 1368, or to the reference sequence corresponding to SEQ ID NO: 1368, wherein the amino acid sequence comprises one or more substitutions relative to the reference sequence corresponding to residues 135-413 of SEQ ID NO: 1368, or relative to the reference sequence corresponding to SEQ ID NO: 1368.

[0219] In some embodiments, the engineered protease polypeptide comprises an amino acid sequence having at least 70%, 75%, 80%, 81%, 82%, 83%, 84%, 85%, 86%, 87%, 88%, 89%, 90%, 91%, 92%, 93%, 94%, 95%, 96%, 97%, 98%, or 99%, or more sequence identity to a reference sequence corresponding to residues 135-413 of an even-numbered SEQ ID NO. of SEQ ID NOs: 1424-1608, or to a reference sequence corresponding to an even-numbered SEQ ID NO. of SEQ ID NOs: 1424-1608, wherein the amino acid sequence comprises one or more substitutions relative to the reference sequence corresponding to residues 135-413 of SEQ ID NO: 1368, or relative to the reference sequence corresponding to SEQ ID NO: 1368.

[0220] In some embodiments, the amino acid sequence of the engineered protease polypeptide comprises at least a substitution or substitution set at amino acid position(s) 31, 318, 296, 252, 303, 253, 413, 386, 312, 235, 412, 342, 302, 371, 405, 389, 391, 358, 139/273/311/328/372, 311, 372, 139/143/157/160/268/273/311/315, 143, 139/143, 139/160/312/372, 143/273/328, 346, 135/139/160/268/312/342/346, 139/141/273, 135/141/143/268/273/312/372, 139/141/143/311, 139/157/268/328/346/372, 53/139/141/143/273/372, 139, 139/141/143/273/312, 137/139/221/233/413, 233, 221/279, 137/139/233/279, 221, 139/214, 137/139/156, 139/214/221, 214/233, 137/139/221/233/279, 137/139/221, 137/139, 137/139/279, 137, 137/139/214/279, 266, 139/221, 137/221, 137/156/214/312, 137/221/233, 137/139/156/221, 137/139/214, 279, 137/139/233, 137/139/214/233, 221/413, 137/214/233, 137/156, 137/139/221/233, 214/221, 137/221/413, 214, 137/233, 137/413, 137/221/279, 137/139/156/214/233/413, or 137/139/156/214, wherein the amino acid positions are relative to the reference sequence corresponding to residues 135-413 of SEQ ID NO: 1368, or relative to the reference sequence corresponding to SEQ ID NO: 1368.

[0221] In some embodiments, the amino acid sequence of the engineered protease polypeptide comprises at least a substitution or substitution set, or amino acid residue(s) 31G, 318R, 296R, 296M, 252P, 303A, 253C, 413C, 386P, 413A, 312R, 235R, 412P, 342A, 413S, 302P, 371L, 405L, 312A, 389P, 318P, 391S, 412T, 358S, 389C, 235V, 391L, 139N/273V/311T/328V/372S, 311T, 312S, 372S, 139N/143H/157S/160S/268S/273V/311T/315T, 143H, 139N/143H, 139N/160S/312S/372S, 143H/273V/328V, 346S, 135A/139N/160S/268S/312S/342S/346S, 139N/141N/273V, 135A/141N/143H/268S/273V/312S/372S, 139N/141N/143H/311T, 139N/157S/268S/328V/346S/372S, 53A/139N/141N/143H/273V/372S, 139N, 139N/141N/143H/273V/312S, 139L, 137A/139N/221Q/233L/413D, 233L, 221Q/279K, 137N/139N/233L/279M, 221Q, 139L/214V, 137N/139N/156V, 139L/214V/221Q, 214V/233L, 137A/139L/221Q/233L/279K, 137A/139L/221Q, 137N/139L, 137N/139L/279K, 137A/139N, 137N, 137N/139L/221Q, 137N/139L/214P/279M, 266Y, 139L/221Q, 137N/221Q, 137N/139N, 137N/156V/214V/312C, 137N/221Q/233L, 137N/139N/156V/221Q, 137A/139L/214V, 413D, 279K, 279M, 137A/139L/233L, 137N/139N/214V/233I, 221Q/413D, 137N/214V/233L, 137A/139L/214P, 137N/139N/221Q/233L/279M, 137N/156V, 137N/139L/221Q/233I, 214V/221Q, 137N/221Q/413D, 137A/139L/221Q/233L/279M, 214V, 137A/139L, 137N/233L, 137A, 137N/413D, 137N/221Q/279K, 137N/139N/156V/214V/233L/413D, or 137N/139L/156V/214V, wherein the amino acid positions are relative to the reference sequence corresponding to residues 135-413 of SEQ ID NO: 1368, or relative to the reference sequence corresponding to SEQ ID NO: 1368.

[0222] In some embodiments, the amino acid sequence of the engineered protease polypeptide comprises at least a substitution or substitution set D31G, S318R, S296R, S296M, D252P, S303A, A253C, G413C, E386P, G413A, Q312R, S235R, G412P, G342A, G413S, S302P, 1371L, V405L, Q312A, S389P, S318P, T391S, G412T, A358S, S389C, S235V, T391L, C139N/T273V/D311T/L328V/V372S, D311T, Q312S, V372S, C139N/A143H/G157S/L160S/G268S/T273V/D311T/V315T, A143H, C139N/A143H, C139N/L160S/Q312S/V372S, A143H/T273V/L328V, T346S, G135A/C139N/L160S/G268S/Q312S/G342S/T346S, C139N/V141N/T273V, G135A/V141N/A143H/G268S/T273V/Q312S/V372S, C139N/V141N/A143H/D311T, C139N/G157S/G268S/L328V/T346S/V372S, T53A/C139N/V141N/A143H/T273V/V372S, C139N, C139N/V141N/A143H/T273V/Q312S, C139L, H137A/C139N/S221Q/S233L/G413D, S233L, S221Q/Q279K, H137N/C139N/S233L/Q279M, S221Q, C139L/S214V, H137N/C139N/T156V, C139L/S214V/S221Q, S214V/S233L, H137A/C139L/S221Q/S233L/Q279K, H137A/C139L/S221Q, H137N/C139L, H137N/C139L/Q279K, H137A/C139N, H137N, H137N/C139L/S221Q, H137N/C139L/S214P/Q279M, N266Y, C139L/S221Q, H137N/S221Q, H137N/C139N, H137N/T156V/S214V/Q312C, H137N/S221Q/S233L, H137N/C139N/T156V/S221Q, H137A/C139L/S214V, G413D, Q279K, Q279M, H137A/C139L/S233L, H137N/C139N/S214V/S233I, S221Q/G413D, H137N/S214V/S233L, H137A/C139L/S214P, H137N/C139N/S221Q/S233L/Q279M, H137N/T156V, H137N/C139L/S221Q/S233I, S214V/S221Q, H137N/S221Q/G413D, H137A/C139L/S221Q/S233L/Q279M, S214V, H137A/C139L, H137N/S233L, H137A, H137N/G413D, H137N/S221Q/Q279K, H137N/C139N/T156V/S214V/S233L/G413D, or H137N/C139L/T156V/S214V, wherein the amino acid positions are relative to the reference sequence corresponding to residues 135-413 of SEQ ID NO: 1368, or relative to the reference sequence corresponding to SEQ ID NO: 1368.

[0223] In some embodiments, the engineered protease polypeptide comprises an amino acid sequence having at least 70%, 75%, 80%, 81%, 82%, 83%, 84%, 85%, 86%, 87%, 88%, 89%, 90%, 91%, 92%, 93%, 94%, 95%, 96%, 97%, 98%, or 99%, or more sequence identity to the reference sequence corresponding to residues 135-413 of SEQ ID NO: 1548, or to the reference sequence corresponding to SEQ ID NO: 1548, wherein the amino acid sequence comprises one or more substitutions relative to the reference sequence corresponding to residues 135-413 of SEQ ID NO: 1548, or relative to the reference sequence corresponding to SEQ ID NO: 1548.

[0224] In some embodiments, the engineered protease polypeptide comprises an amino acid sequence having at least 70%, 75%, 80%, 81%, 82%, 83%, 84%, 85%, 86%, 87%, 88%, 89%, 90%, 91%, 92%, 93%, 94%, 95%, 96%, 97%, 98%, or 99%, or more sequence identity to a reference sequence corresponding to residues 135-413 of an even-numbered SEQ ID NO. of SEQ ID NOs: 1610-1710, or to a reference sequence corresponding to an even-numbered SEQ ID NO. of SEQ ID NOs: 1610-1710, wherein the amino acid sequence comprises one or more substitutions relative to the reference sequence corresponding to residues 135-413 of SEQ ID NO: 1548, or relative to the reference sequence corresponding to SEQ ID NO: 1548.

[0225] In some embodiments, the amino acid sequence of the engineered protease polypeptide comprises at least a substitution or substitution set at amino acid position(s) 145/273/372, 145/256/273, 221/243/273/328/372, 372, 145/221/279/372/406, 273/328, 145/169/273/346/406, 256/273, 145/221/273/328/346/406, 243/273, 145/214/256/273/279/328/372, 169/221/328/372/406, 372/406, 169/328/372/406, 221/372, 145/221/273/328/372, 214/243/273/328, 145/221, 214/256/273/346/372, 221/406, 169/372, 145/214/221/273, 145/221/346/372, 243/273/328/372/406, 145/169/273/328/346, 328, 169/273/372, 145/221/328, 169/214/273, 221/273/328, 221, 145/328, 214/346, 312, 212, 279, 212/312, 145, 179/346, 214, 346, 315/372, 375, 264, 179, 185, 220/372, or 324, wherein the amino acid positions are relative to the reference sequence corresponding to residues 135-413 of SEQ ID NO: 1548, or relative to the reference sequence corresponding to SEQ ID NO: 1548.

[0226] In some embodiments, the amino acid sequence of the engineered protease polypeptide comprises at least a substitution or substitution set, or amino acid residue(s) 145E/273L/372S, 145E/256M/273L, 221Q/243L/273L/328V/372S, 372S, 145E/221Q/279L/372S/406R, 273L/328V, 145E/169S/273L/346S/406R, 256M/273L, 145E/221Q/273L/328V/346S/406R, 243L/273L, 145E/214V/256M/273L/279L/328V/372S, 169S/221Q/328V/372S/406R, 372S/406R, 169S/328V/372S/406R, 221Q/372S, 145E/221Q/273L/328V/372S, 214V/243L/273L/328V, 145E/221Q, 214V/256M/273L/346S/372S, 221Q/406R, 169S/372S, 145E/214V/221Q/273L, 145E/221Q/346S/372S, 243L/273L/328V/372S/406R, 145E/169S/273L/328V/346S, 328V, 169S/273L/372S, 145E/221Q/328V, 169S/214V/273L, 221Q/273L/328V, 221Q, 145E/328V, 214N/346S, 312R, 212S, 279K, 212S/312R, 145E, 179S/346S, 214N, 346S, 315R/372Y, 372Y, 375A, 264F, 179S, 185T, 220R/372Y, 324D, 145E/221Q/273L/328V/372S, or 145E/221Q/273L/328V/372S, wherein the amino acid positions are relative to the reference sequence corresponding to residues 135-413 of SEQ ID NO: 1548, or relative to the reference sequence corresponding to SEQ ID NO: 1548.

[0227] In some embodiments, the amino acid sequence of the engineered protease polypeptide comprises at least a substitution or substitution set N145E/T273L/V372S, N145E/I256M/T273L, S221Q/Q243L/T273L/L328V/V372S, V372S, N145E/S221Q/M279L/V372S/A406R, T273L/L328V, N145E/T169S/T273L/T346S/A406R, I256M/T273L, N145E/S221Q/T273L/L328V/T346S/A406R, Q243L/T273L, N145E/P214V/I256M/T273L/M279L/L328V/V372S, T169S/S221Q/L328V/V372S/A406R, V372S/A406R, T169S/L328V/V372S/A406R, S221Q/V372S, N145E/S221Q/T273L/L328V/V372S, P214V/Q243L/T273L/L328V, N145E/S221Q, P214V/I256M/T273L/T346S/V372S, S221Q/A406R, T169S/V372S, N145E/P214V/S221Q/T273L, N145E/S221Q/T346S/V372S, Q243L/T273L/L328V/V372S/A406R, N145E/T169S/T273L/L328V/T346S, L328V, T169S/T273L/V372S, N145E/S221Q/L328V, T169S/P214V/T273L, S221Q/T273L/L328V, S221Q, N145E/L328V, P214N/T346S, Q312R, Y212S, M279K, Y212S/Q312R, N145E, A179S/T346S, P214N, T346S, V315R/V372Y, V372Y, Q375A, G264F, A179S, N185T, Q220R/V372Y, S324D, N145E/S221Q/T273L/L328V/V372S, or N145E/S221Q/T273L/L328V/V372S, wherein the amino acid positions are relative to the reference sequence corresponding to residues 135-413 of SEQ ID NO: 1548, or relative to the reference sequence corresponding to SEQ ID NO: 1548.

[0228] In some embodiments, the amino acid sequence of the engineered protease polypeptide comprises at least a substitution at an amino acid position set forth in Tables 3.1, 3.2, 4.1, 4.2, 5.1, 5.2, 6.1, 7.1, 8.1, and 9.1, wherein the amino acid positions are relative to the reference sequence corresponding to residues 135-413 of SEQ ID NO: 4, 628, 948, 1126, 1368, or 1548, or relative to the reference sequence corresponding to SEQ ID NO: 4, 628, 948, 1126, 1368, or 1548.

[0229] In some embodiments, the amino acid sequence of the engineered protease polypeptide comprises at least a substitution set forth in Tables 3.1, 3.2, 4.1, 4.2, 5.1, 5.2, 6.1, 7.1, 8.1, and 9.1, wherein the amino acid positions are relative to the reference sequence corresponding to residues 135-413 of SEQ ID NO: 4, 628, 948, 1126, 1368, or 1548, or relative to the reference sequence corresponding to SEQ ID NO: 4, 628, 948, 1126, 1368, or 1548.

[0230] In some embodiments, the amino acid sequence of the engineered protease polypeptide comprises at least a substitution or substitution set at amino acid position(s) set forth in Tables 3.1, 3.2, 4.1, 4.2, 5.1, 5.2, 6.1, 7.1, 8.1, and 9.1, wherein the amino acid positions are relative to the reference sequence corresponding to residues 135-413 of SEQ ID NO: 4, 628, 948, 1126, 1368, or 1548, or relative to the reference sequence corresponding to SEQ ID NO: 4, 628, 948, 1126, 1368, or 1548.

[0231] In some embodiments, the amino acid sequence of the engineered protease polypeptide comprises at least a substitution or substitution set of a reference engineered protease polypeptide set forth in Tables 3.1, 3.2, 4.1, 4.2, 5.1, 5.2, 6.1, 7.1, 8.1, and 9.1, wherein the amino acid positions are relative to the reference sequence corresponding to residues 135-413 of SEQ ID NO: 4, 628, 948, 1126, 1368, or 1548, or relative to the reference sequence corresponding to SEQ ID NO: 4, 628, 948, 1126, 1368, or 1548.

[0232] In some embodiments, the engineered protease polypeptide comprises an amino acid sequence having at least 70%, 75%, 80%, 81%, 82%, 83%, 84%, 85%, 86%, 87%, 88%, 89%, 90%, 91%, 92%, 93%, 94%, 95%, 96%, 97%, 98%, or 99%, or more sequence identity to the reference sequence comprising at least a substitution or substitution set of an engineered protease polypeptide variant set forth in Tables 3.1, 3.2, 4.1, 4.2, 5.1, 5.2, 6.1, 7.1, 8.1, and 9.1, wherein the amino acid positions are relative to the reference sequence corresponding to residues 135-413 of SEQ ID NO: 4, 628, 948, 1126, 1368, or 1548, or relative to the reference sequence corresponding to SEQ ID NO: 4, 628, 948, 1126, 1368, or 1548.

[0233] In some embodiments, the amino acid sequence of the engineered protease polypeptide comprises amino acid residues 135-413, or comprises amino acid residues 128-413, wherein the engineered protease polypeptide is proteolytically active or is an active protease.

[0234] In some embodiments, the engineered protease polypeptide comprises an amino acid sequence having at least 70%, 75%, 80%, 81%, 82%, 83%, 84%, 85%, 86%, 87%, 88%, 89%, 90%, 91%, 92%, 93%, 94%, 95%, 96%, 97%, 98%, or 99%, or more sequence identity to an amino acid sequence comprising residues 135-413 of an amino acid sequence of a protease variant set forth in Tables 3.1, 3.2, 4.1, 4.2, 5.1, 5.2, 6.1, 7.1, 8.1, and 9.1, or to an amino acid sequence comprising an amino acid sequence of a variant set forth in Tables 3.1, 3.2, 4.1, 4.2, 5.1, 5.2, 6.1, 7.1, 8.1, and 9.1.

[0235] In some embodiments, the engineered protease polypeptide comprises an amino acid sequence comprising residues 135-413, or residues 128-413 of SEQ ID NO: 6, 8, 10, 12, 14, 16, 18, 20, 22, 24, 26, 28, 30, 32, 34, 36, 38, 40, 42, 44, 46, 48, 50, 52, 54, 56, 58, 60, 62, 64, 66, 68, 70, 72, 74, 76, 78, 80, 82, 84, 86, 88, 90, 92, 94, 96, 98, 100, 102, 104, 106, 108, 110, 112, 114, 116, 118, 120, 122, 124, 126, 128, 130, 132, 134, 136, 138, 140, 142, 144, 146, 148, 150, 152, 154, 156, 158, 160, 162, 164, 166, 168, 170, 172, 174, 176, 178, 180, 182, 184, 186, 188, 190, 192, 194, 196, 198, 200, 202, 204, 206, 208, 210, 212, 214, 216, 218, 220, 222, 224, 226, 228, 230, 232, 234, 236, 238, 240, 242, 244, 246, 248, 250, 252, 254, 256, 258, 260, 262, 264, 266, 268, 270, 272, 274, 276, 278, 280, 282, 284, 286, 288, 290, 292, 294, 296, 298, 300, 302, 304, 306, 308, 310, 312, 314, 316, 318, 320, 322, 324, 326, 328, 330, 332, 334, 336, 338, 340, 342, 344, 346, 348, 350, 352, 354, 356, 358, 360, 362, 364, 366, 368, 370, 372, 374, 376, 378, 380, 382, 384, 386, 388, 390, 392, 394, 396, 398, 400, 402, 404, 406, 408, 410, 412, 414, 416, 418, 420, 422, 424, 426, 428, 430, 432, 434, 436, 438, 440, 442, 444, 446, 448, 450, 452, 454, 456, 458, 460, 462, 464, 466, 468, 470, 472, 474, 476, 478, 480, 482, 484, 486, 488, 490, 492, 494, 496, 498, 500, 502, 504, 506, 508, 510, 512, 514, 516, 518, 520, 522, 524, 526, 528, 530, 532, 534, 536, 538, 540, 542, 544, 546, 548, 550, 552, 554, 556, 558, 560, 562, 564, 566, 568, 570, 572, 574, 576, 578, 580, 582, 584, 586, 588, 590, 592, 594, 596, 598, 600, 602, 604, 606, 608, 610, 612, 614, 616, 618, 620, 622, 624, 626, 628, 630, 632, 634, 636, 638, 640, 642, 644, 646, 648, 650, 652, 654, 656, 658, 660, 662, 664, 666, 668, 670, 672, 674, 676, 678, 680, 682, 684, 686, 688, 690, 692, 694, 696, 698, 700, 702, 704, 706, 708, 710, 712, 714, 716, 718, 720, 722, 724, 726, 728, 730, 732, 734, 736, 738, 740, 742, 744, 746, 748, 750, 752, 754, 756, 758, 760, 762, 764, 766, 768, 770, 772, 774, 776, 778, 780, 782, 784, 786, 788, 790, 792, 794, 796, 798, 800, 802, 804, 806, 808, 810, 812, 814, 816, 818, 820, 822, 824, 826, 828, 830, 832, 834, 836, 838, 840, 842, 844, 846, 848, 850, 852, 854, 856, 858, 860, 862, 864, 866, 868, 870, 872, 874, 876, 878, 880, 882, 884, 886, 888, 890, 892, 894, 896, 898, 900, 902, 904, 906, 908, 910, 912, 914, 918, 920, 922, 924, 926, 928, 930, 932, 934, 936, 938, 940, 942, 944, 946, 948, 950, 952, 954, 956, 958, 960, 962, 964, 966, 968, 970, 972, 974, 976, 978, 980, 982, 984, 986, 988, 990, 992, 994, 996, 998, 1000, 1002, 1004, 1006, 1008, 1010, 1012, 1014, 1016, 1018, 1020, 1022, 1024, 1026, 1028, 1030, 1032, 1034, 1036, 1038, 1040, 1042, 1044, 1046, 1048, 1050, 1052, 1054, 1056, 1058, 1060, 1062, 1064, 1066, 1068, 1070, 1072, 1074, 1076, 1078, 1080, 1082, 1084, 1086, 1088, 1090, 1092, 1094, 1096, 1098, 1100, 1102, 1104, 1106, 1108, 1110, 1112, 1114, 1116, 1118, 1120, 1122, 1124, 1126, 1128, 1130, 1132, 1134, 1136, 1138, 1140, 1142, 1144, 1146, 1148, 1150, 1152, 1154, 1156, 1158, 1160, 1162, 1164, 1166, 1168, 1170, 1172, 1174, 1176, 1178, 1180, 1182, 1184, 1186, 1188, 1190, 1192, 1194, 1196, 1198, 1200, 1202, 1204, 1206, 1208, 1210, 1212, 1214, 1216, 1218, 1220, 1222, 1224, 1226, 1228, 1230, 1232, 1234, 1236, 1238, 1240, 1242, 1244, 1246, 1248, 1250, 1252, 1254, 1256, 1258, 1260, 1262, 1264, 1266, 1268, 1270, 1272, 1274, 1276, 1278, 1280, 1282, 1284, 1286, 1288, 1290, 1292, 1294, 1296, 1298, 1300, 1302, 1304, 1306, 1308, 1310, 1312, 1314, 1316, 1318, 1320, 1322, 1324, 1326, 1328, 1330, 1332, 1334, 1336, 1338, 1340, 1342, 1344, 1346, 1348, 1350, 1352, 1354, 1356, 1358, 1360, 1362, 1364, 1366, 1368, 1370, 1372, 1374, 1376, 1378, 1380, 1382, 1384, 1386, 1388, 1390, 1392, 1394, 1396, 1398, 1400, 1402, 1404, 1406, 1408, 1410, 1412, 1414, 1416, 1418, 1420, 1422, 1424. 1426, 1428, 1430, 1432, 1434, 1436, 1438, 1440, 1442, 1444, 1446, 1448, 1450, 1452, 1454, 1456, 1458, 1460, 1462, 1464, 1468, 1470, 1472, 1474, 1476, 1478, 1480, 1482, 1484, 1486, 1488, 1490, 1492, 1494, 1496, 1498, 1500, 1502, 1504, 1506, 1508, 1510, 1512, 1514, 1516, 1518, 1520, 1522, 1524, 1526, 1528, 1530, 1532, 1534, 1536, 1538, 1540, 1542, 1544, 1546, 1548, 1550, 1552, 1554, 1556, 1558, 1560, 1562, 1564, 1566, 1568, 1570, 1572, 1574, 1576, 1578, 1580, 1582, 1584, 1586, 1588, 1590, 1592, 1594, 1596, 1598, 1600, 1602, 1604, 1606, 1608, 1610, 1612, 1614, 1616, 1618, 1620, 1622, 1624, 1626, 1628, 1630, 1632, 1634, 1636, 1638, 1640, 1642, 1644, 1646, 1648, 1650, 1652, 1654, 1656, 1658, 1660, 1662, 1664, 1666, 1668, 1670, 1672, 1674, 1676, 1678, 1680, 1682, 1684, 1686, 1688, 1690, 1692, 1694, 1696, 1698, 1700, 1702, 1704, 1706, 1708, 1710, 1712, 1714, 1716, 1718, 1720, 1722, 1724, 1726, 1728, 1730, 1732, 1734, 1736, 1738, 1740, 1742, 1744, 1746, 1748, 1750, 1752, 1754, 1756, 1758, 1760, 1762, 1764, 1766, 1768, 1770, 1772, 1774, 1776, 1778, 1780, 1782, 1784, 1786, 1788, 1790, 1792, 1794, 1796, 1798, 1800, 1802, 1804, 1806, 1808, 1810, 1812, 1814, 1816, 1818, 1820, 1822, 1824, 1826, 1828, 1830, 1832, 1834, 1836, 1838, 1840, 1842, 1844, 1846, 1848, 1850, 1852, 1854, 1856, 1858, 1860, 1862, 1864, 1866, 1868, 1870, 1872, 1874, 1876, 1878, 1880, 1882, 1884, 1886, 1888, 1890, 1892, 1894, 1896, 1898, 1900, 1902, 1904, 1906, 1908, 1910, 1912, 1914, 1916, 1918, 1920, 1922, 1924, 1926, 1928, 1930, 1932, 1934, 1936, 1938, 1940, 1942, 1944, 1946, 1948, 1950, 1952, 1954, 1956, 1958, 1960, 1962, 1964, 1966, 1968, 1970, 1972, 1974, 1976, 1978, 1980, 1982, 1984, 1986, 1988, 1990, 1992, 1994, 1996, 1998, 2000, 2002, 2004, 2006, 2008, 2010, 2012, 2014, 2016, 2018, 2020, 2022, 2024, 2026, 2028, 2030, 2032, 2034, 2036, 2038, 2040, 2042, 2044, 2046, 2048, 2050, 2052, 2054, 2056, 2058, 2060, 2062, 2064, 2066, 2068, 2070, 2072, 2074, 2076, 2078, 2080, 2082, 2084, 2086, 2088, 2090, 2092, 2094, 2096, 2098, 2100, 2102, 2104, 2106, 2108, 2110, 2112, 2114, 2116, 2118, 2120, 2122, 2124, 2126, 2128, 2130, 2132, 2134, 2136, 2138, 2140, 2142, 2144, 2146, 2148, 2150, 2152, 2154, 2156, 2158, 2160, 2162, 2164, 2166, 2168, 2170, 2172, 2174, 2176, 2178, 2180, 2182, 2184, 2186, 2188, 2190, 2192, 2194, 2196, 2198, 2200, 2202, 2204, 2206, 2208, 2210, 2212, 2214, 2216, 2218, 2220, 2222, 2224, 2226, 2228, 2230, 2232, 2234, 2236, 2238, 2240, or 2242. In some embodiments, the amino acid sequence of the engineered protease polypeptide optionally has 1, 2, 3, 4, 5, 6, 7, 8, 9, or up to 10 insertions, substitutions, and/or deletions. In some embodiments, the amino acid sequence optionally has 1, 2, 3, 4, 5, 6, 7, 8, 9, or up to 10 substitutions. In some of embodiments, the amino acid sequence of the engineered protease polypeptide optionally has 1, 2, 3, 4, up to 5 insertions, substitutions, and/or deletions. In some embodiments, the amino acid sequence optionally has 1, 2, 3, 4, up to 5 substitutions. In some embodiments, the substitutions comprise non-conservative and/or conservative substitutions. In some embodiments, the substitutions comprise conservative substitutions.

[0236] In some embodiments, the engineered protease polypeptide comprises an amino acid sequence comprising SEQ ID NO: 6, 8, 10, 12, 14, 16, 18, 20, 22, 24, 26, 28, 30, 32, 34, 36, 38, 40, 42, 44, 46, 48, 50, 52, 54, 56, 58, 60, 62, 64, 66, 68, 70, 72, 74, 76, 78, 80, 82, 84, 86, 88, 90, 92, 94, 96, 98, 100, 102, 104, 106, 108, 110, 112, 114, 116, 118, 120, 122, 124, 126, 128, 130, 132, 134, 136, 138, 140, 142, 144, 146, 148, 150, 152, 154, 156, 158, 160, 162, 164, 166, 168, 170, 172, 174, 176, 178, 180, 182, 184, 186, 188, 190, 192, 194, 196, 198, 200, 202, 204, 206, 208, 210, 212, 214, 216, 218, 220, 222, 224, 226, 228, 230, 232, 234, 236, 238, 240, 242, 244, 246, 248, 250, 252, 254, 256, 258, 260, 262, 264, 266, 268, 270, 272, 274, 276, 278, 280, 282, 284, 286, 288, 290, 292, 294, 296, 298, 300, 302, 304, 306, 308, 310, 312, 314, 316, 318, 320, 322, 324, 326, 328, 330, 332, 334, 336, 338, 340, 342, 344, 346, 348, 350, 352, 354, 356, 358, 360, 362, 364, 366, 368, 370, 372, 374, 376, 378, 380, 382, 384, 386, 388, 390, 392, 394, 396, 398, 400, 402, 404, 406, 408, 410, 412, 414, 416, 418, 420, 422, 424, 426, 428, 430, 432, 434, 436, 438, 440, 442, 444, 446, 448, 450, 452, 454, 456, 458, 460, 462, 464, 466, 468, 470, 472, 474, 476, 478, 480, 482, 484, 486, 488, 490, 492, 494, 496, 498, 500, 502, 504, 506, 508, 510, 512, 514, 516, 518, 520, 522, 524, 526, 528, 530, 532, 534, 536, 538, 540, 542, 544, 546, 548, 550, 552, 554, 556, 558, 560, 562, 564, 566, 568, 570, 572, 574, 576, 578, 580, 582, 584, 586, 588, 590, 592, 594, 596, 598, 600, 602, 604, 606, 608, 610, 612, 614, 616, 618, 620, 622, 624, 626, 628, 630, 632, 634, 636, 638, 640, 642, 644, 646, 648, 650, 652, 654, 656, 658, 660, 662, 664, 666, 668, 670, 672, 674, 676, 678, 680, 682, 684, 686, 688, 690, 692, 694, 696, 698, 700, 702, 704, 706, 708, 710, 712, 714, 716, 718, 720, 722, 724, 726, 728, 730, 732, 734, 736, 738, 740, 742, 744, 746, 748, 750, 752, 754, 756, 758, 760, 762, 764, 766, 768, 770, 772, 774, 776, 778, 780, 782, 784, 786, 788, 790, 792, 794, 796, 798, 800, 802, 804, 806, 808, 810, 812, 814, 816, 818, 820, 822, 824, 826, 828, 830, 832, 834, 836, 838, 840, 842, 844, 846, 848, 850, 852, 854, 856, 858, 860, 862, 864, 866, 868, 870, 872, 874, 876, 878, 880, 882, 884, 886, 888, 890, 892, 894, 896, 898, 900, 902, 904, 906, 908, 910, 912, 914, 918, 920, 922, 924, 926, 928, 930, 932, 934, 936, 938, 940, 942, 944, 946, 948, 950, 952, 954, 956, 958, 960, 962, 964, 966, 968, 970, 972, 974, 976, 978, 980, 982, 984, 986, 988, 990, 992, 994, 996, 998, 1000, 1002, 1004, 1006, 1008, 1010, 1012, 1014, 1016, 1018, 1020, 1022, 1024, 1026, 1028, 1030, 1032, 1034, 1036, 1038, 1040, 1042, 1044, 1046, 1048, 1050, 1052, 1054, 1056, 1058, 1060, 1062, 1064, 1066, 1068, 1070, 1072, 1074, 1076, 1078, 1080, 1082, 1084, 1086, 1088, 1090, 1092, 1094, 1096, 1098, 1100, 1102, 1104, 1106, 1108, 1110, 1112, 1114, 1116, 1118, 1120, 1122, 1124, 1126, 1128, 1130, 1132, 1134, 1136, 1138, 1140, 1142, 1144, 1146, 1148, 1150, 1152, 1154, 1156, 1158, 1160, 1162, 1164, 1166, 1168, 1170, 1172, 1174, 1176, 1178, 1180, 1182, 1184, 1186, 1188, 1190, 1192, 1194, 1196, 1198, 1200, 1202, 1204, 1206, 1208, 1210, 1212, 1214, 1216, 1218, 1220, 1222, 1224, 1226, 1228, 1230, 1232, 1234, 1236, 1238, 1240, 1242, 1244, 1246, 1248, 1250, 1252, 1254, 1256, 1258, 1260, 1262, 1264, 1266, 1268, 1270, 1272, 1274, 1276, 1278, 1280, 1282, 1284, 1286, 1288, 1290, 1292, 1294, 1296, 1298, 1300, 1302, 1304, 1306, 1308, 1310, 1312, 1314, 1316, 1318, 1320, 1322, 1324, 1326, 1328, 1330, 1332, 1334, 1336, 1338, 1340, 1342, 1344, 1346, 1348, 1350, 1352, 1354, 1356, 1358, 1360, 1362, 1364, 1366, 1368, 1370, 1372, 1374, 1376, 1378, 1380, 1382, 1384, 1386, 1388, 1390, 1392, 1394, 1396, 1398, 1400, 1402, 1404, 1406, 1408, 1410, 1412, 1414, 1416, 1418, 1420, 1422, 1424. 1426, 1428, 1430, 1432, 1434, 1436, 1438, 1440, 1442, 1444, 1446, 1448, 1450, 1452, 1454, 1456, 1458, 1460, 1462, 1464, 1468, 1470, 1472, 1474, 1476, 1478, 1480, 1482, 1484, 1486, 1488, 1490, 1492, 1494, 1496, 1498, 1500, 1502, 1504, 1506, 1508, 1510, 1512, 1514, 1516, 1518, 1520, 1522, 1524, 1526, 1528, 1530, 1532, 1534, 1536, 1538, 1540, 1542, 1544, 1546, 1548, 1550, 1552, 1554, 1556, 1558, 1560, 1562, 1564, 1566, 1568, 1570, 1572, 1574, 1576, 1578, 1580, 1582, 1584, 1586, 1588, 1590, 1592, 1594, 1596, 1598, 1600, 1602, 1604, 1606, 1608, 1610, 1612, 1614, 1616, 1618, 1620, 1622, 1624, 1626, 1628, 1630, 1632, 1634, 1636, 1638, 1640, 1642, 1644, 1646, 1648, 1650, 1652, 1654, 1656, 1658, 1660, 1662, 1664, 1666, 1668, 1670, 1672, 1674, 1676, 1678, 1680, 1682, 1684, 1686, 1688, 1690, 1692, 1694, 1696, 1698, 1700, 1702, 1704, 1706, 1708, 1710, 1712, 1714, 1716, 1718, 1720, 1722, 1724, 1726, 1728, 1730, 1732, 1734, 1736, 1738, 1740, 1742, 1744, 1746, 1748, 1750, 1752, 1754, 1756, 1758, 1760, 1762, 1764, 1766, 1768, 1770, 1772, 1774, 1776, 1778, 1780, 1782, 1784, 1786, 1788, 1790, 1792, 1794, 1796, 1798, 1800, 1802, 1804, 1806, 1808, 1810, 1812, 1814, 1816, 1818, 1820, 1822, 1824, 1826, 1828, 1830, 1832, 1834, 1836, 1838, 1840, 1842, 1844, 1846, 1848, 1850, 1852, 1854, 1856, 1858, 1860, 1862, 1864, 1866, 1868, 1870, 1872, 1874, 1876, 1878, 1880, 1882, 1884, 1886, 1888, 1890, 1892, 1894, 1896, 1898, 1900, 1902, 1904, 1906, 1908, 1910, 1912, 1914, 1916, 1918, 1920, 1922, 1924, 1926, 1928, 1930, 1932, 1934, 1936, 1938, 1940, 1942, 1944, 1946, 1948, 1950, 1952, 1954, 1956, 1958, 1960, 1962, 1964, 1966, 1968, 1970, 1972, 1974, 1976, 1978, 1980, 1982, 1984, 1986, 1988, 1990, 1992, 1994, 1996, 1998, 2000, 2002, 2004, 2006, 2008, 2010, 2012, 2014, 2016, 2018, 2020, 2022, 2024, 2026, 2028, 2030, 2032, 2034, 2036, 2038, 2040, 2042, 2044, 2046, 2048, 2050, 2052, 2054, 2056, 2058, 2060, 2062, 2064, 2066, 2068, 2070, 2072, 2074, 2076, 2078, 2080, 2082, 2084, 2086, 2088, 2090, 2092, 2094, 2096, 2098, 2100, 2102, 2104, 2106, 2108, 2110, 2112, 2114, 2116, 2118, 2120, 2122, 2124, 2126, 2128, 2130, 2132, 2134, 2136, 2138, 2140, 2142, 2144, 2146, 2148, 2150, 2152, 2154, 2156, 2158, 2160, 2162, 2164, 2166, 2168, 2170, 2172, 2174, 2176, 2178, 2180, 2182, 2184, 2186, 2188, 2190, 2192, 2194, 2196, 2198, 2200, 2202, 2204, 2206, 2208, 2210, 2212, 2214, 2216, 2218, 2220, 2222, 2224, 2226, 2228, 2230, 2232, 2234, 2236, 2238, 2240, or 2242. In some embodiments, the amino acid sequence of the engineered protease polypeptide optionally has 1, 2, 3, 4, 5, 6, 7, 8, 9, or up to 10 insertions, substitutions, and/or deletions. In some embodiments, the amino acid sequence optionally has 1, 2, 3, 4, 5, 6, 7, 8, 9, or up to 10 substitutions. In some of embodiments, the amino acid sequence of the engineered protease polypeptide optionally has 1, 2, 3, 4, up to 5 insertions, substitutions, and/or deletions. In some embodiments, the amino acid sequence optionally has 1, 2, 3, 4, up to 5 substitutions. In some embodiments, the substitutions comprise non-conservative and/or conservative substitutions. In some embodiments, the substitutions comprise conservative substitutions.

[0237] In some embodiments, the engineered protease polypeptide comprises an amino acid sequence comprising residues 135-413 of SEQ ID NO: 628, 948, 1126, 1368, 1547, 1640, or 1710, or an amino acid sequence comprising SEQ ID NO: 628, 948, 1126, 1368, 1547, 1640, or 1710. In some embodiments, the amino acid sequence of the engineered protease polypeptide optionally has 1, 2, 3, 4, 5, 6, 7, 8, 9, or up to 10 insertions, substitutions, and/or deletions. In some embodiments, the amino acid sequence optionally has 1, 2, 3, 4, 5, 6, 7, 8, 9, or up to 10 substitutions. In some of embodiments, the amino acid sequence of the engineered protease polypeptide optionally has 1, 2, 3, 4, up to 5 insertions, substitutions, and/or deletions. In some embodiments, the amino acid sequence optionally has 1, 2, 3, 4, up to 5 substitutions. In some embodiments, the substitutions comprise non-conservative and/or conservative substitutions. In some embodiments, the substitutions comprise conservative substitutions.

[0238] In some embodiments, the engineered protease polypeptide described herein, particularly the pro-polypeptide form, is capable of converting or forming a proteolytically active polypeptide or an active protease. In some embodiments, the formation of a proteolytically active polypeptide or an active protease is by auto-proteolysis. In some embodiments, the formation of a proteolytically active polypeptide or an active protease is by proteolysis by another protease, including any of the proteolytically active polypeptide or active protease of the engineered protease polypeptide described herein.

[0239] In some embodiments, the engineered protease polypeptide comprises a proteolytically active polypeptide or is an active protease. In some embodiments, the proteolytically active polypeptide or active protease comprises amino acid residues 135-413, or comprises amino acid residues 128-413 of any of the engineered protease polypeptide described herein.

[0240] In some embodiments, the proteolytically active polypeptide or active protease of the engineered protease polypeptide has an improved property as compared to a reference protease polypeptide.

[0241] In some embodiments, the proteolytically active polypeptide or active protease of the engineered protease polypeptide has increased protease activity as compared to a reference protease. In some embodiments, the proteolytically active polypeptide or active protease of the engineered protease polypeptide has at least 1.1, 1.2, 1.3, 1.4, 1.5, 2, 2.5, 3, 3.5, 4, 4.5, or 5 or greater fold increase in protease activity as compared to the reference protease. Exemplary increases in protease activity compared to the reference protease are provided in the Examples.

[0242] In some embodiments, the proteolytically active polypeptide or active protease of the engineered protease polypeptide has increased resistance to a gastric protease as compared to a reference protease. In some embodiments, the proteolytically active polypeptide or active protease of the engineered protease polypeptide has increased resistance to pepsin as compared to the reference protease. In some embodiments, the increased resistance to the gastric protease is at acidic pH conditions.

[0243] In some embodiments, the proteolytically active polypeptide or active protease of the engineered protease polypeptide has increased stability and/or activity at acidic pH or neutral pH as compared to a reference protease. In some embodiments, the proteolytically active polypeptide or active protease of the engineered protease polypeptide has at least 1.1, 1.2, 1.3, 1.4, 1.5, 2, 2.5, 3, 3.5, 4, 4.5, or 5 or greater fold increase in protease activity at acidic pH or neutral as compared to the reference protease. In some embodiments, the acidic pH is from about 2.8 to 4.5.

[0244] In some embodiments, the proteolytically active polypeptide or active protease of the engineered protease polypeptide has increased thermostability as compared to a reference protease. In some embodiments, the proteolytically active polypeptide or active protease of the engineered protease polypeptide has increased thermostability at temperature of about 64° C. or 71° C. as compared to the reference protease.

[0245] In some embodiments, the proteolytically active polypeptide or active protease of the engineered protease polypeptide is characterized by an improved property selected from: i) increased protease activity, ii) increased resistance to pepsin, iii) increased stability and/or activity at acidic pH, iv) increased stability and/or activity at neutral pH, or v) increased thermostability, or any combination of i), ii), iii), iv), and v) as compared to a reference protease.

[0246] In some embodiments, the reference protease has an amino acid sequence corresponding to residues 135-413 of SEQ ID NO: 4, 628, 948, 1126, 1368, or 1548; residues 128-413 of SEQ ID NO: 4, 628, 948, 1126, 1368, or 1548; or a mature active protease of SEQ ID NO: 4, 628, 948, 1126, 1368, or 1548. In some embodiments, the reference protease has an amino acid sequence corresponding to residues 135-413 or residues 128-413 of SEQ ID NO: 4 or 628, or a mature active protease of SEQ ID NO: 4 or 628. In some embodiments, the reference protease is a proteolytically active polypeptide of SEQ ID NO: 2.

[0247] In some embodiments, the pro-polypeptide or proteolytically active polypeptide of the engineered protease polypeptide described herein includes or further comprises at the carboxy terminal region a Big-1 domain. In some embodiments, the Big-1 domain is that of SEQ ID NO: 2. In some embodiments, the Big-1 domain comprises amino acid residues 426-522 of SEQ ID NO: 2.

[0248] In some embodiments, the engineered protease polypeptide comprises a deletion of the protease of SEQ ID NO: 2, where the deletion is of at least the carboxy terminal region of SEQ ID NO: 2, and wherein the deletion maintains the protease activity of the mature form of SEQ ID NO: 2. In some embodiments, the carboxy terminal region deleted comprises deletion of the Big-1 domain. In some embodiments, the carboxy terminal deletion is up to and including amino acid residue 426, or up to and including amino acid residue 414 of SEQ ID NO: 2. In some embodiments, the engineered protease polypeptide further comprises 1, 2, 3, 4, 5, 6, 7, 8, 9, or up to 10 amino acid deletions of the carboxy terminus at amino acid residue 413 of SEQ ID NO: 2, wherein the further amino acid deletion(s) maintain proteolytic activity of the mature form of SEQ ID NO: 2 having the further amino acid deletions. In some embodiments, the mature form of the protease polypeptide has an amino terminus at amino acid residue 128 or 135 of SEQ ID NO: 2.

[0249] In some embodiments, the engineered protease polypeptide further comprises a fusion polypeptide or a fusion protein. In some embodiments, the engineered protease polypeptide further comprises a heterologous fusion polypeptide or a fusion protein. In some embodiments, the engineered protease polypeptide described herein can be fused to a variety of polypeptide or protein sequences, such as, by way of example and not limitation, polypeptide tags that can be used for detection and/or purification. In some embodiments, the fusion polypeptide of the recombinant protease polypeptide comprises a glycine-histidine or histidine-tag (His-tag). In some embodiments, the fusion polypeptide of the engineered protease polypeptide comprises an epitope tag, such as c-myc, FLAG, V5, or hemagglutinin (HA). In some embodiments, the fusion polypeptide of the engineered protease polypeptide comprises a GST, SUMO, Strep, MBP, or GFP tag. In some embodiments, the fusion is to the amino (N-) terminus of the engineered protease polypeptide. In some embodiments, the fusion is to the carboxy (C-) terminus of the engineered protease polypeptide. In some embodiments, the fusion polypeptide is inserted following a signal sequence and before the engineered protease polypeptide to allow expression and secretion of the protease polypeptide comprising the fusion polypeptide (e.g., polypeptide tag) and engineered protease polypeptide.

[0250] In some embodiments, the engineered protease polypeptide further comprises a signal sequence or signal peptide. In some embodiments, the signal sequence or signal peptide is functional in the host cell used or to be used for expression of the engineered protease polypeptide. In some embodiments the signal sequence or signal peptide is fused to a pro-polypeptide form of the engineered protease polypeptide, e.g., for forming a pre-pro-polypeptide. In some embodiments, the signal sequence or signal peptide is fused to the polypeptide that includes the proteolytically active polypeptide or active protease of the engineered protease polypeptide. In some embodiments, the signal sequence or signal peptide can be a bacterial, fungal, or mammalian signal sequence or signal polypeptide. In some embodiments, the signal sequence or signal peptide can be a naturally occurring signal sequence or a synthetic signal sequence, including a hybrid signal sequence.

[0251] In some embodiments, the signal sequence or signal peptide is a bacterial signal sequence or signal peptide, or a signal sequence or signal peptide functional in bacterial cells. In some embodiments, the bacterial signal sequence or signal peptide is recognized by the general secretion (Sec) or twin-arginine translocation (Tat) pathway (see, e.g., Freudl, R., Microbial Cell Factories, 2018, 17(52):1-10). In some embodiments, the signal sequence or signal peptide can be a Sec signal sequence or signal peptide from genes encoding, among others, LamB, MalE, OmpA, OmpF, OmpN, OmpC, OmpX, PhoA, PhoE, GBP, TolC, TolB, or CirA. In some embodiments, the signal sequence or signal peptide can be a Tat signal sequence or signal peptide from genes encoding, among others, TorA, TorZ, AmiA, AmiC, FtsP, EfeB, YcbK, NrfC, WcaM, YahJ, MdoD, or FhuD.

[0252] In some embodiments, signal sequence or signal peptide is a fungal (e.g., yeast) signal sequence or signal peptide or a signal sequence, or a signal peptide functional in fungal cells. Exemplary fungal signal sequence or signal peptide includes, among others, those found in Pichia pastoris Ost1, Pichia pastoris Pst1, S. cerevisiae α-mating factor pre-pro sequence, S. cerevisiae invertase, Komagataella pastoris yeast α-factor, S. cerevisiae CYP, Pichia pastoris PH08, S. cerevisiae PEP4, S. cerevisiae SUC2, Pichia pastoris KAR2, Pichia pastoris DSE4, Pichia pastoris EXG1, or Pichia pastoris SCW10.

[0253] In some embodiments, the signal sequence or signal peptide is a mammalian or insect cell signal sequence or signal peptide, or a signal sequence or signal peptide functional in mammalian cells or insect cells. Exemplary mammalian or insect signal sequence or signal peptide includes those from, among others, human OSM, VSV-G, mouse Ig Kappa, mouse Ig heavy, BM40, Secrecon, human IgKVIII, CD33, tPA, human chymotrypsinogen, human trypsinogen-2, human IL-2, human serum albumin (HSA), influenza haemagglutinin, human insulin, silkworm Fibroin LC, and honeybee melittin signal peptide of gp64 or gp67.

[0254] In some embodiments, for any of the engineered protease polypeptide disclosed herein, the engineered protease polypeptide is purified or is a purified preparation or composition. In some embodiments, the purified preparation comprises the pro-polypeptide of the engineered protease polypeptide. In some embodiments, the purified preparation comprises the proteolytically active polypeptide or the active protease form of the engineered protease polypeptide.

[0255] In some embodiments, the present disclosure further provides a functional or biologically active fragment of an engineered protease polypeptide described herein. In some embodiments, functional or biologically active fragments have at least 80%, 81%, 82%, 83%, 84%, 85%, 86%, 87%, 88%, 89%, 90%, 91%, 92%, 93%, 94%, 95%, 96%, 97%, 98%, or 99% of the activity of the proteolytically active polypeptide or the active protease of the engineered protease polypeptide from which it was derived (i.e., the parent engineered protease polypeptide). In some embodiments, a functional or biologically active fragment comprises at least 80%, 81%, 82%, 83%, 84%, 85%, 86%, 87%, 88%, 89%, 90%, 91%, 92%, 93%, 94%, 95%, 96%, 97%, 98%, or 99% of the parent sequence of the engineered protease polypeptide.

[0256] In some embodiments the functional or biologically active fragment is truncated by less than 5, less than 10, less than 15, less than 10, less than 25, less than 30, less than 35, less than 40, less than 45, and less than 50 amino acids of the parent engineered protease polypeptide.

[0257] In some embodiments, the functional or biologically active fragment of the engineered protease polypeptide described herein includes at least a mutation or mutation set in the amino acid sequence of the parent engineered protease polypeptide variant described herein. Accordingly, in some embodiments, the functional or biologically active fragments of the engineered protease polypeptide displays the enhanced or improved property associated with the mutation or mutation set in the parent engineered protease polypeptide variant.

### Polynucleotides Encoding Engineered Protease Polypeptides, Expression Vectors, and Host Cells

[0258] In a further aspect, the present disclosure provides a recombinant polynucleotide encoding an engineered protease polypeptide described herein, expression vectors comprising the recombinant polynucleotide operably linked to one or more control sequences, and appropriate host cells comprising the expression vector for expression of the engineered protease polypeptide.

[0259] As will be apparent to the skilled artisan, availability of a protein sequence and the knowledge of the codons corresponding to the various amino acids provide a description of all the polynucleotides capable of encoding the subject polypeptides. The degeneracy of the genetic code, where the same amino acids are encoded by alternative or synonymous codons, allows an extremely large number of nucleic acids to be made, all of which encode the engineered protease polypeptide. Thus, having knowledge of a particular amino acid sequence, those skilled in the art could make any number of different nucleic acids by simply modifying the sequence of one or more codons in a way which does not change the amino acid sequence of the encoded protein. In this regard, the present disclosure specifically contemplates each and every possible variation of polynucleotides that could be made encoding the engineered protease polypeptide described herein by selecting combinations based on the possible codon choices, and all such polynucleotide variations are to be considered specifically disclosed for any polypeptide described herein, including the engineered protease polypeptide set forth in Tables 3.1, 3.2, 4.1, 4.2, 5.1, 5.2, 6.1, 7.1, 8.1, and 9.1, and the accompanying Sequence Listing.

[0260] In some embodiments, the codons are preferably optimized for utilization by the chosen host cell for protein production. In some embodiments, the polynucleotide encoding the engineered protease polypeptide preferably uses preferred codons used in bacterial cells for expression in bacterial cells. In some embodiments, the polynucleotide encoding the engineered protease polypeptide preferably uses preferred codons used in fungal cells for expression in fungal cells. In some embodiments, the polynucleotide encoding the engineered protease polypeptide preferably uses preferred codons used in insect cells for expression insect cells. In some embodiments, the polynucleotide encoding the engineered protease polypeptide preferably uses preferred codons used in mammalian cells for expression in mammalian cells. In some embodiments, codon optimized polynucleotides encoding an engineered protease polypeptide described herein contain preferred codons at about 40%, 50%, 60%, 70%, 80%, 90%, or greater than 90% of the codon positions in the coding region.

[0261] As discussed above, it is to be understood that the present disclosure provides recombinant polynucleotides encoding each and every engineered protease polypeptide described herein, including a pre-pro-polypeptide, pro-polypeptide, or proteolytically active polypeptide thereof, or a biologically or functionally active fragment thereof.

[0262] In some embodiments, the recombinant polynucleotide comprises a polynucleotide sequence encoding an engineered protease polypeptide comprising an amino acid sequence having at least 80%, 81%, 82%, 83%, 84%, 85%, 86%, 87%, 88%, 89%, 90%, 91%, 92%, 93%, 94%, 95%, 96%, 97%, 98%, 99%, or more sequence identity to the reference sequence corresponding to residues 135-413 of SEQ ID NO: 4, 628, 948, 1126, 1368, or 1548, or to the reference sequence corresponding to SEQ ID NO: 4, 628, 948, 1126, 1368, or 1548, wherein the amino acid sequence comprises one or more substitutions relative to the reference sequence corresponding to residues 135-413 of SEQ ID NO: 4, 628, 948, 1126, 1368, or 1548, or relative to the reference sequence corresponding to SEQ ID NO: 4, 628, 948, 1126, 1368, or 1548.

[0263] In some embodiments, the recombinant polynucleotide comprises a polynucleotide sequence encoding an engineered protease polypeptide comprising an amino acid sequence having at least 70%, 75%, 80%, 81%, 82%, 83%, 84%, 85%, 86%, 87%, 88%, 89%, 90%, 91%, 92%, 93%, 94%, 95%, 96%, 97%, 98%, or 99%, or more sequence identity to the reference sequence corresponding to residues 135-413 of SEQ ID NO: 4 or 628, or to the reference sequence corresponding to SEQ ID NO: 4 or 628, wherein the amino acid sequence comprises one or more substitutions relative to the reference sequence corresponding to residues 135-413 of SEQ ID NO: 4 or 628, or relative to the reference sequence corresponding to SEQ ID NO: 4 or 628.

[0264] In some embodiments, the recombinant polynucleotide comprises a polynucleotide sequence encoding an engineered protease polypeptide comprising an amino acid sequence having at least 70%, 75%, 80%, 81%, 82%, 83%, 84%, 85%, 86%, 87%, 88%, 89%, 90%, 91%, 92%, 93%, 94%, 95%, 96%, 97%, 98%, or 99%, or more sequence identity to the reference sequence corresponding to residues 135-413 of SEQ ID NO: 948, 1126, 1368, or 1548, or to the reference sequence corresponding to SEQ ID NO: 948, 1126, 1368, or 1548, wherein the amino acid sequence comprises one or more substitutions relative to the reference sequence corresponding to residues 135-413 of SEQ ID NO: 4 or 628, or relative to the reference sequence corresponding to SEQ ID NO: 4 or 628.

[0265] In some embodiments, the recombinant polynucleotide comprises a polynucleotide sequence encoding an engineered protease polypeptide comprising an amino acid sequence having at least 70%, 75%, 80%, 81%, 82%, 83%, 84%, 85%, 86%, 87%, 88%, 89%, 90%, 91%, 92%, 93%, 94%, 95%, 96%, 97%, 98%, or 99%, or more sequence identity to the reference sequence corresponding to residues 135-413 of an even-numbered SEQ ID NO. of SEQ ID NOs: 6-1710, or to the reference sequence corresponding to an even-numbered SEQ ID NO. of SEQ ID NOs: 6-1710, wherein the amino acid sequence comprises one or more substitutions relative to the reference sequence corresponding to residues 135-413 of SEQ ID NO: 4 or 628, or relative to the reference sequence corresponding to SEQ ID NO: 4 or 628.

[0266] In some embodiments, the recombinant polynucleotide comprises a polynucleotide sequence encoding an engineered protease polypeptide comprising an amino acid sequence comprising at least a substitution at amino acid position 11, 31, 42, 45, 50, 53, 84, 99, 100, 126, 128, 129, 130, 131, 132, 134, 135, 136, 137, 138, 139, 140, 141, 143, 145, 151, 154, 156, 157, 159, 160, 161, 162, 163, 169, 172, 173, 174, 179, 180, 184, 185, 186, 187, 188, 190, 191, 192, 193, 194, 198, 199, 212, 214, 220, 221, 222, 223, 225, 231, 232, 233, 235, 237, 238, 239, 240, 242, 243, 245, 246, 249, 250, 251, 252, 253, 254, 256, 258, 262, 263, 264, 265, 266, 267, 268, 269, 271, 273, 274, 275, 277, 278, 279, 280, 281, 283, 285, 290, 292, 293, 294, 296, 297, 300, 302, 303, 311, 312, 313, 314, 315, 316, 318, 324, 328, 336, 339, 341, 342, 343, 345, 346, 355, 358, 360, 364, 367, 368, 369, 370, 371, 372, 373, 374, 375, 377, 381, 382, 384, 386, 389, 391, 392, 401, 402, 405, 406, 409, 410, 411, 412, or 413, or combinations thereof, wherein the amino acid positions are relative to the reference sequence corresponding to residues 135-413 of SEQ ID NO: 4 or 628, or relative to the reference sequence corresponding to SEQ ID NO: 4 or 628.

[0267] In some embodiments, the recombinant polynucleotide comprises a polynucleotide sequence encoding an engineered protease polypeptide comprising an amino acid sequence comprising at least a substitution at amino acid position 135, 137, 139, 141, 143, 157, 160, 214, 268, 273, 279, 311, 312, 315, 328, 342, 345, 346, or 372, or combinations thereof, wherein the amino acid positions are relative to the reference sequence corresponding to residues 135-413 of SEQ ID NO: 4 or 628, or relative to the reference sequence corresponding to SEQ ID NO: 4 or 628.

[0268] In some embodiments, the recombinant polynucleotide comprises a polynucleotide sequence encoding an engineered protease polypeptide comprising an amino acid sequence comprising at least a substitution set at amino acid positions 135/141/160/311/315/372, 143/328/342/345, 139/157/268/273/312/346, or 137/139/214/279, wherein the amino acid positions are relative to the reference sequence corresponding to residues 135-413 of SEQ ID NO: 4 or 628, or relative to the reference sequence corresponding to SEQ ID NO: 4 or 628.

[0269] In some embodiments, the recombinant polynucleotide comprises a polynucleotide sequence encoding an engineered protease polypeptide comprising an amino acid sequence comprising at least a substitution or substitution set at amino acid position(s) 185, 134, 129, 135, 184, 132, 186, 193, 263, 370, 45/134, 199, 368, 161, 141, 267, 179, 264, 160, 138, 131, 372, 151, 274, 128, 339, 313, 374, 314, 191, 324, 315, 375, 136, 220, 194, 231, 277, 369, 251, 180, 163, 343, 264/279, 279, 232, 141/300, 367, 266, 188, 130, 318, 265, 341, 190, 145, 126/192, 11/220, 192, 370/392, 99/278, 265/311, 84/159/265/279/311/370, 311/316, 342/370, 265/311/370, 192/311/316, 141/154/192, 265/311/316/342, 279/311/316, 141/265/279/311/342, 141/192/311/316/370, 141/265/311, 198/279, 392, 342/370/392, 141/198/265, 265/392, 184/267, 342, 312, 100/251, 141/220, 311/316/370, 99, 278, 405, 311/342/370, 141/198, 311/342, 141/311, 279/311/377/392, 186/198/311/342/370/392, 141/392, 311/370/392, 141/311/392, 311/370, 311/316/392, 265/311/392, 141/192, 311, 141/265/311/392, 192/311/370/392, 198/265/311/316/370, 141/186/265/311, or 141/198/265/311/370, wherein the amino acid positions are relative to the reference sequence corresponding to residues 135-413 of SEQ ID NO: 4 or 628, or relative to the reference sequence corresponding to SEQ ID NO: 4 or 628.

[0270] In some embodiments, the recombinant polynucleotide comprises a polynucleotide sequence encoding an engineered protease polypeptide comprising an amino acid sequence comprising at least a substitution or substitution set at amino acid position(s) 242, 157, 250, 373, 243, 336, 187, 240, 280, 271, 237, 386, 382, 328, 42, 391, 381, 275, 249, 239, 384, 139, 364, 346, 389, 254, 246, 345, 360, 303, 300, 269, 135/141/372, 311/315/372, 136/141/311, 141/188, 135/136, 135/141/315, 372, 135/141/160/267/372, 135/136/141/160/185/188/267/311/315, 160/185, 135/141/188/279/311, 135/136/141, 135/136/141/372, 135/141/160/185/267/279, 135/141/160/267, 141/188/311/372, 160/185/188/279/311, 136/141/279, 135/136/141/160/185/188, 141/372, 135/136/141/311, 185/311/315/372, 135/141/188, 136/185, 135/141, 135/136/141/279/315/372, 135/311/315, 141, 311/372, 188/311, 135/141/188/372, 141/160/279, 313/392, 342/392, 279/392, 128, 198/342, 313, 128/312, 50, 145/263, 313/342, 279/312, 312/392, 279/342, 128/342, 342, 263, 143, 262, 156, 169, 143/237, 136/160/185/267/311/372, 135/160/311/372, 135/141/311/315, 141/311/315, 136/141/160/185/188/311/315/372, 135/141/311/315/372, 135/141/160/185/311/315, 135/141/267/311/315/372, 135/136/141/160/311/315, 135/136/141/279, 135/141/267/279/311/315, 135/141/160, 135/141/160/311/315/372, 135/141/160/311/315, 135/136/141/188/311, 141/160/311, 135/141/160/279/311/315/372, 141/160/185/279/311/372, 135/136/141/160/315/372, 135/136/160/279/311/372, 128/279/312/342, 128/198/312/342, 263/342, 145/263/279/312/342/392, or 128/145/198/312/313/392, wherein the amino acid positions are relative to the reference sequence corresponding to residues 135-413 of SEQ ID NO: 4 or 628, or relative to the reference sequence corresponding to SEQ ID NO: 4 or 628.

[0271] In some embodiments, the recombinant polynucleotide comprises a polynucleotide sequence encoding an engineered protease polypeptide comprising an amino acid sequence comprising at least a substitution at amino acid position 135, 137, 139, 141, 143, 145, 145, 157, 160, 214, 221, 268, 273, 279, 311, 312, 315, 315, 342, 345, 346, 402, 409, 410, 412, or 413, or combinations thereof, wherein the amino acid positions are relative to the reference sequence corresponding to residues 135-413 of SEQ ID NO: 4 or 628, or relative to the reference sequence corresponding to SEQ ID NO: 4 or 628.

[0272] In some embodiments, the recombinant polynucleotide comprises a polynucleotide sequence encoding an engineered protease polypeptide comprising an amino acid sequence comprising at least a substitution at an amino acid position set forth in Tables 3.1, 3.2, 4.1, 4.2, 5.1, 5.2, 6.1, 7.1, 8.1, and 9.1, wherein the amino acid positions are relative to the reference sequence corresponding to residues 135-413 of SEQ ID NO: 4 or 628, or relative to the reference sequence corresponding to SEQ ID NO: 4 or 628.

[0273] In some embodiments, the recombinant polynucleotide comprises a polynucleotide sequence encoding an engineered protease polypeptide comprising an amino acid sequence comprising at least a substitution as set forth in Tables 3.1, 3.2, 4.1, 4.2, 5.1, 5.2, 6.1, 7.1, 8.1, and 9.1, wherein the amino acid positions are relative to the reference sequence corresponding to residues 135-413 of SEQ ID NO: 4 or 628, or relative to the reference sequence corresponding to SEQ ID NO: 4 or 628.

[0274] In some embodiments, the recombinant polynucleotide comprises a polynucleotide sequence encoding an engineered protease polypeptide comprising an amino acid sequence comprising at least a substitution or substitution set at amino acid position(s) set forth in Tables 3.1, 3.2, 4.1, 4.2, 5.1, 5.2, 6.1, 7.1, 8.1, and 9.1, wherein the amino acid positions are relative to the reference sequence corresponding to residues 135-413 of SEQ ID NO: 4 or 628, or relative to the reference sequence corresponding to SEQ ID NO: 4 or 628.

[0275] In some embodiments, the recombinant polynucleotide comprises a polynucleotide sequence encoding an engineered protease polypeptide comprising an amino acid sequence comprising at least a substitution or substitution set of an engineered protease polypeptide set forth in Tables 3.1, 3.2, 4.1, 4.2, 5.1, 5.2, 6.1, 7.1, 8.1, and 9.1, wherein the amino acid positions are relative to the reference sequence corresponding to residues 135-413 of SEQ ID NO: 4 or 628, or relative to the reference sequence corresponding to SEQ ID NO: 4 or 628.

[0276] In some embodiments, the recombinant polynucleotide comprises a polynucleotide sequence encoding an engineered protease polypeptide comprising an amino acid sequence having at least 70%, 75%, 80%, 81%, 82%, 83%, 84%, 85%, 86%, 87%, 88%, 89%, 90%, 91%, 92%, 93%, 94%, 95%, 96%, 97%, 98%, or 99%, or more sequence identity to the reference sequence having a substitution or substitution set as set forth in Tables 3.1, 3.2, 4.1, 4.2, 5.1, 5.2, 6.1, 7.1, 8.1, and 9.1, wherein the amino acid positions are relative to the reference sequence corresponding to residues 135-413 of SEQ ID NO: 4 or 628, or relative to the reference sequence corresponding to SEQ ID NO: 4 or 628.

[0277] In some embodiments, the recombinant polynucleotide comprises a polynucleotide sequence encoding an engineered protease polypeptide comprising an amino acid sequence having at least 70%, 75%, 80%, 81%, 82%, 83%, 84%, 85%, 86%, 87%, 88%, 89%, 90%, 91%, 92%, 93%, 94%, 95%, 96%, 97%, 98%, or 99%, or more sequence identity to the reference sequence corresponding to residues 135-413 of SEQ ID NO: 948, 1126, 1368, or 1548, or to the reference sequence corresponding to SEQ ID NO: 948, 1126, 1368, or 1548.

[0278] In some embodiments, the recombinant polynucleotide comprises a polynucleotide sequence encoding an engineered protease polypeptide comprising an amino acid sequence having at least 70%, 75%, 80%, 81%, 82%, 83%, 84%, 85%, 86%, 87%, 88%, 89%, 90%, 91%, 92%, 93%, 94%, 95%, 96%, 97%, 98%, or 99%, or more sequence identity to the reference sequence corresponding to residues 135-413 of an even-numbered SEQ ID NO. of SEQ ID NOs: 6-2242, or to the reference sequence corresponding to an even-numbered SEQ ID NO. of SEQ ID NOs: 6-2242.

[0279] In some embodiments, the recombinant polynucleotide comprises a polynucleotide sequence encoding an engineered protease polypeptide comprising an amino acid sequence having at least 70%, 75%, 80%, 81%, 82%, 83%, 84%, 85%, 86%, 87%, 88%, 89%, 90%, 91%, 92%, 93%, 94%, 95%, 96%, 97%, 98%, or 99%, or more sequence identity to the reference sequence corresponding to residues 135-413 of SEQ ID NO: 948, 1126, 1368, or 1548, or to the reference sequence corresponding to SEQ ID NO: 948, 1126, 1368, or 1548, wherein the amino acid sequence comprises one or more substitutions relative to the reference sequence corresponding to residues 135-413 of SEQ ID NO: 948, 1126, 1368, or 1548, or relative to the reference sequence corresponding to SEQ ID NO: 948, 1126, 1368, or 1548.

[0280] In some embodiments, the recombinant polynucleotide comprises a polynucleotide sequence encoding an engineered protease polypeptide comprising an amino acid sequence having at least 70%, 75%, 80%, 81%, 82%, 83%, 84%, 85%, 86%, 87%, 88%, 89%, 90%, 91%, 92%, 93%, 94%, 95%, 96%, 97%, 98%, or 99%, or more sequence identity to the reference sequence corresponding to residues 135-413 of an even-numbered SEQ ID NO. of SEQ ID NOs: 6-2242, or to the reference sequence corresponding to an even-numbered SEQ ID NO. of SEQ ID NOs: 6-2242, wherein the amino acid sequence comprises one or more substitutions relative to the reference sequence corresponding to residues 135-413 of SEQ ID NO: 948, 1126, 1368, or 1548, or relative to the reference sequence corresponding to SEQ ID NO: 948, 1126, 1368, or 1548.

[0281] In some embodiments, the recombinant polynucleotide comprises a polynucleotide sequence encoding an engineered protease polypeptide comprising at least a substitution at amino acid position 11, 31, 42, 45, 50, 53, 84, 99, 100, 126, 128, 129, 130, 131, 132, 134, 135, 136, 137, 138, 139, 140, 141, 143, 145, 151, 154, 156, 157, 159, 160, 161, 162, 163, 169, 172, 173, 174, 179, 180, 184, 185, 186, 187, 188, 190, 191, 192, 193, 194, 198, 199, 212, 214, 220, 221, 222, 223, 225, 231, 232, 233, 235, 237, 238, 239, 240, 242, 243, 245, 246, 249, 250, 251, 252, 253, 254, 256, 258, 262, 263, 264, 265, 266, 267, 268, 269, 271, 273, 274, 275, 277, 278, 279, 280, 281, 283, 285, 290, 292, 293, 294, 296, 297, 300, 302, 303, 311, 312, 313, 314, 315, 316, 318, 324, 328, 336, 339, 341, 342, 343, 345, 346, 355, 358, 360, 364, 367, 368, 369, 370, 371, 372, 373, 374, 375, 377, 381, 382, 384, 386, 389, 391, 392, 401, 402, 405, 406, 409, 410, 411, 412, or 413, or combinations thereof, wherein the amino acid positions are relative to the reference sequence corresponding to residues 135-413 of SEQ ID NO: 948, 1126, 1368, or 1548, or relative to the reference sequence corresponding to SEQ ID NO: 948, 1126, 1368, or 1548.

[0282] In some embodiments, the recombinant polynucleotide comprises a polynucleotide sequence encoding an engineered protease polypeptide comprising at least a substitution at amino acid position 135, 137, 139, 141, 143, 157, 160, 214, 268, 273, 279, 311, 312, 315, 328, 342, 345, 346, or 372, or combinations thereof, wherein the amino acid positions are relative to the reference sequence corresponding to residues 135-413 of SEQ ID NO: 948, 1126, 1368, or 1548, or relative to the reference sequence corresponding to SEQ ID NO: 948, 1126, 1368, or 1548.

[0283] In some embodiments, the recombinant polynucleotide comprises a polynucleotide sequence encoding an engineered protease polypeptide comprising an amino acid sequence having at least 70%, 75%, 80%, 81%, 82%, 83%, 84%, 85%, 86%, 87%, 88%, 89%, 90%, 91%, 92%, 93%, 94%, 95%, 96%, 97%, 98%, or 99%, or more sequence identity to the reference sequence corresponding to residues 135-413 of SEQ ID NO: 948, or to the reference sequence corresponding to SEQ ID NO: 948, wherein the amino acid sequence comprises one or more substitutions relative to the reference sequence corresponding to residues 135-413 of SEQ ID NO: 948, or relative to the reference sequence corresponding to SEQ ID NO: 948.

[0284] In some embodiments, the recombinant polynucleotide comprises a polynucleotide sequence encoding an engineered protease polypeptide comprising an amino acid sequence having at least 70%, 75%, 80%, 81%, 82%, 83%, 84%, 85%, 86%, 87%, 88%, 89%, 90%, 91%, 92%, 93%, 94%, 95%, 96%, 97%, 98%, or 99%, or more sequence identity to the reference sequence corresponding to residues 135-413 of an even-numbered SEQ ID NO. of SEQ ID NOs: 950-1154, or to the reference sequence corresponding to an even-numbered SEQ ID NO. of SEQ ID NOs: 950-1154, wherein the amino acid sequence comprises one or more substitutions relative to the reference sequence corresponding to residues 135-413 of SEQ ID NO: 948, or relative to the reference sequence corresponding to SEQ ID NO: 948.

[0285] In some embodiments, the recombinant polynucleotide comprises a polynucleotide sequence encoding an engineered protease polypeptide comprising an amino acid sequence comprising at least a substitution or substitution set at amino acid position(s) 411, 402, 285, 245, 266, 355, 258, 222, 140, 268, 225, 283, 406, 410, 143/145/243/312, 139/143/145/157/312, 139/157/345, 139/269, 156/157/342/346, 139/143, 269, 139/243/328, 269/328, 143/145/169, 328, 143/145/262, 145/262/312/328, 139/156/157, 139/145/312, 312, 139, 139/312, 139/156, 139/143/145/243, 145/157, 145/346, 145/262/312/328/345/346, 145/262, 312/342, 143/243, 139/345, 342, 143/145/262/342, 139/143/169, 139/143/145/312, 169, 139/145/262/312/328/342/345/346, 139/328, 139/243, 139/143/328, 139/143/243, 139/145, 145/312, 145/169, 139/143/157/312, 84/139/143, 145/269, 143/145/157/269/312/328, 143/145/269, 157, 139/143/312, 256, 273, 409, 172, 401, 281, 253, 143/145/243/328, 145, 139/143/145/328/342/345, 143/328/342/345, 145/342/345, 143, 139/145/328/342/345, 143/145/169/312/328/345/346, 143/243/328/342/345/346, 139/143/157/169/328/346, 143/145/156/312/328, 139/145/157/312/328, 143/328/342/345/346, 143/145, 143/145/312/342/345, or 143/145/328, wherein the amino acid positions are relative to the reference sequence corresponding to residues 135-413 of SEQ ID NO: 948, or relative to the reference sequence corresponding to SEQ ID NO: 948.

[0286] In some embodiments, the recombinant polynucleotide comprises a polynucleotide sequence encoding an engineered protease polypeptide comprising an amino acid sequence having at least 70%, 75%, 80%, 81%, 82%, 83%, 84%, 85%, 86%, 87%, 88%, 89%, 90%, 91%, 92%, 93%, 94%, 95%, 96%, 97%, 98%, or 99%, or more sequence identity to the reference sequence corresponding to residues 135-413 of SEQ ID NO: 1126, or to the reference sequence corresponding to SEQ ID NO: 1126, wherein the amino acid sequence comprises one or more substitutions relative to the reference sequence corresponding to residues 135-413 of SEQ ID NO: 1126, or relative to the reference sequence corresponding to SEQ ID NO: 1126.

[0287] In some embodiments, the recombinant polynucleotide comprises a polynucleotide sequence encoding an engineered protease polypeptide comprising an amino acid sequence having at least 70%, 75%, 80%, 81%, 82%, 83%, 84%, 85%, 86%, 87%, 88%, 89%, 90%, 91%, 92%, 93%, 94%, 95%, 96%, 97%, 98%, or 99%, or more sequence identity to the reference sequence corresponding to residues 135-413 of an even-numbered SEQ ID NO. of SEQ ID NOs: 1156-1422, or to the reference sequence corresponding to an even-numbered SEQ ID NO. of SEQ ID NOs: 1156-1422, wherein the amino acid sequence comprises one or more substitutions relative to the reference sequence corresponding to residues 135-413 of SEQ ID NO: 1126, or relative to the reference sequence corresponding to SEQ ID NO: 1126.

[0288] In some embodiments, the recombinant polynucleotide comprises a polynucleotide sequence encoding an engineered protease polypeptide comprising an amino acid sequence comprising at least a substitution or substitution set at amino acid position(s) 279, 250, 154, 214, 249, 275, 137, 161, 180, 174, 139, 254, 145, 278, 136, 154/413, 294, 237, 274, 264, 185, 277, 293, 233, 173, 312, 302, 238, 135, 221, 290, 263, 267, 239, 163, 292, 246, 243, 235, 156, 223, 278/413, 297, 194, 251, 253/411, 145/157/253/268/273/281/312/346/411, 139/346, 253, 346/411, 253/346, 312/346, 273/312, 253/281, 157/253/273/312/346/411, 139/157/253/268/273/281/312/346, 253/273/411, 139/253/268/273/281, 139/157/411, 157, 273, 139/253/268/273/281/312/411, 157/253/411, 139/145/253/346, 139/157/253/273/312, 139/157/268/273/312/346, 157/273/312/346, 139/411, 139/253/268/273/281/312/346/411, 157/273/346/411, 139/145/157/162/253/273/281/312, 139/253/273/281/312, 157/253/268/273/281/312, 139/253/268, 139/157/312, 253/273/281/346, 157/253/312/346/411, 157/273/312/346/411, 139/145/157/253/268/281/312, 139/273/312/346, 157/253/268/273/312/346, 139/268/346, 268/273/312/346, 139/157/253/268/273/312, 139/157/253, 139/253/281, 139/157/253/268/273, 253/312/411, or 139/268/273, wherein the amino acid positions are relative to the reference sequence corresponding to residues 135-413 of SEQ ID NO: 1126, or relative to the reference sequence corresponding to SEQ ID NO: 1126.

[0289] In some embodiments, the recombinant polynucleotide comprises a polynucleotide sequence encoding an engineered protease polypeptide comprising an amino acid sequence having at least 70%, 75%, 80%, 81%, 82%, 83%, 84%, 85%, 86%, 87%, 88%, 89%, 90%, 91%, 92%, 93%, 94%, 95%, 96%, 97%, 98%, or 99%, or more sequence identity to the reference sequence corresponding to residues 135-413 of SEQ ID NO: 1368, or to the reference sequence corresponding to SEQ ID NO: 1368, wherein the amino acid sequence comprises one or more substitutions relative to the reference sequence corresponding to residues 135-413 of SEQ ID NO: 1368, or relative to the reference sequence corresponding to SEQ ID NO: 1368.

[0290] In some embodiments, the recombinant polynucleotide comprises a polynucleotide sequence encoding an engineered protease polypeptide comprising an amino acid sequence having at least 70%, 75%, 80%, 81%, 82%, 83%, 84%, 85%, 86%, 87%, 88%, 89%, 90%, 91%, 92%, 93%, 94%, 95%, 96%, 97%, 98%, or 99%, or more sequence identity to the reference sequence corresponding to residues 135-413 of an even-numbered SEQ ID NO. of SEQ ID NOs: 1424-1608, or to the reference sequence corresponding to an even-numbered SEQ ID NO. of SEQ ID NOs: 1424-1608, wherein the amino acid sequence comprises one or more substitutions relative to the reference sequence corresponding to residues 135-413 of SEQ ID NO: 1368, or relative to the reference sequence corresponding to SEQ ID NO: 1368.

[0291] In some embodiments, the recombinant polynucleotide comprises a polynucleotide sequence encoding an engineered protease polypeptide comprising an amino acid sequence comprising at least a substitution or substitution set at amino acid position(s) 31, 318, 296, 252, 303, 253, 413, 386, 312, 235, 412, 342, 302, 371, 405, 389, 391, 358, 139/273/311/328/372, 311, 372, 139/143/157/160/268/273/311/315, 143, 139/143, 139/160/312/372, 143/273/328, 346, 135/139/160/268/312/342/346, 139/141/273, 135/141/143/268/273/312/372, 139/141/143/311, 139/157/268/328/346/372, 53/139/141/143/273/372, 139, 139/141/143/273/312, 137/139/221/233/413, 233, 221/279, 137/139/233/279, 221, 139/214, 137/139/156, 139/214/221, 214/233, 137/139/221/233/279, 137/139/221, 137/139, 137/139/279, 137, 137/139/214/279, 266, 139/221, 137/221, 137/156/214/312, 137/221/233, 137/139/156/221, 137/139/214, 279, 137/139/233, 137/139/214/233, 221/413, 137/214/233, 137/156, 137/139/221/233, 214/221, 137/221/413, 214, 137/233, 137/413, 137/221/279, 137/139/156/214/233/413, or 137/139/156/214, wherein the amino acid positions are relative to the reference sequence corresponding to residues 135-413 of SEQ ID NO: 1368, or relative to the reference sequence corresponding to SEQ ID NO: 1368.

[0292] In some embodiments, the recombinant polynucleotide comprises a polynucleotide sequence encoding an engineered protease polypeptide comprising an amino acid sequence having at least 70%, 75%, 80%, 81%, 82%, 83%, 84%, 85%, 86%, 87%, 88%, 89%, 90%, 91%, 92%, 93%, 94%, 95%, 96%, 97%, 98%, or 99%, or more sequence identity to the reference sequence corresponding to residues 135-413 of SEQ ID NO: 1548, or to the reference sequence corresponding to SEQ ID NO: 1548, wherein the amino acid sequence comprises one or more substitutions relative to the reference sequence corresponding to residues 135-413 of SEQ ID NO: 1548, or relative to the reference sequence corresponding to SEQ ID NO: 1548.

[0293] In some embodiments, the recombinant polynucleotide comprises a polynucleotide sequence encoding an engineered protease polypeptide comprising an amino acid sequence having at least 70%, 75%, 80%, 81%, 82%, 83%, 84%, 85%, 86%, 87%, 88%, 89%, 90%, 91%, 92%, 93%, 94%, 95%, 96%, 97%, 98%, or 99%, or more sequence identity to the reference sequence corresponding to residues 135-413 of an even-numbered SEQ ID NO. of SEQ ID NOs: 1610-1710, or to the reference sequence corresponding to an even-numbered SEQ ID NO. of SEQ ID NOs: 1610-1710, wherein the amino acid sequence comprises one or more substitutions relative to the reference sequence corresponding to residues 135-413 of SEQ ID NO: 1548, or relative to the reference sequence corresponding to SEQ ID NO: 1548.

[0294] In some embodiments, the recombinant polynucleotide comprises a polynucleotide sequence encoding an engineered protease polypeptide comprising an amino acid sequence comprising at least a substitution or substitution set at amino acid position(s) 145/273/372, 145/256/273, 221/243/273/328/372, 372, 145/221/279/372/406, 273/328, 145/169/273/346/406, 256/273, 145/221/273/328/346/406, 243/273, 145/214/256/273/279/328/372, 169/221/328/372/406, 372/406, 169/328/372/406, 221/372, 145/221/273/328/372, 214/243/273/328, 145/221, 214/256/273/346/372, 221/406, 169/372, 145/214/221/273, 145/221/346/372, 243/273/328/372/406, 145/169/273/328/346, 328, 169/273/372, 145/221/328, 169/214/273, 221/273/328, 221, 145/328, 214/346, 312, 212, 279, 212/312, 145, 179/346, 214, 346, 315/372, 375, 264, 179, 185, 220/372, or 324, wherein the amino acid positions are relative to the reference sequence corresponding to residues 135-413 of SEQ ID NO: 1548, or relative to the reference sequence corresponding to SEQ ID NO: 1548.

[0295] In some embodiments, the recombinant polynucleotide comprises a polynucleotide sequence encoding an engineered protease polypeptide comprising an amino acid sequence comprising at least a substitution at an amino acid position set forth in Tables 3.1, 3.2, 4.1, 4.2, 5.1, 5.2, 6.1, 7.1, 8.1, and 9.1, wherein the amino acid positions are relative to the reference sequence corresponding to residues 135-413 of SEQ ID NO: 4, 628, 948, 1126, 1368, or 1548, or relative to the reference sequence corresponding to SEQ ID NO: 4, 628, 948, 1126, 1368, or 1548.

[0296] In some embodiments, the recombinant polynucleotide comprises a polynucleotide sequence encoding an engineered protease polypeptide comprising an amino acid sequence comprising at least a substitution as set forth in Tables 3.1, 3.2, 4.1, 4.2, 5.1, 5.2, 6.1, 7.1, 8.1, and 9.1, wherein the amino acid positions are relative to the reference sequence corresponding to residues 135-413 of SEQ ID NO: 4, 628, 948, 1126, 1368, or 1548, or relative to the reference sequence corresponding to SEQ ID NO: 4, 628, 948, 1126, 1368, or 1548.

[0297] In some embodiments, the recombinant polynucleotide comprises a polynucleotide sequence encoding an engineered protease polypeptide comprising an amino acid sequence comprising at least a substitution or substitution set at amino acid position(s) set forth in Tables 3.1, 3.2, 4.1, 4.2, 5.1, 5.2, 6.1, 7.1, 8.1, and 9.1, wherein the amino acid positions are relative to the reference sequence corresponding to residues 135-413 of SEQ ID NO: 4, 628, 948, 1126, 1368, or 1548, or relative to the reference sequence corresponding to SEQ ID NO: 4, 628, 948, 1126, 1368, or 1548.

[0298] In some embodiments, the recombinant polynucleotide comprises a polynucleotide sequence encoding an engineered protease polypeptide comprising at least a substitution or substitution set of an engineered protease polypeptide variant set forth in Tables 3.1, 3.2, 4.1, 4.2, 5.1, 5.2, 6.1, 7.1, 8.1, and 9.1, wherein the amino acid positions are relative to the reference sequence corresponding to residues 135-413 of SEQ ID NO: 4, 628, 948, 1126, 1368, or 1548, or relative to the reference sequence corresponding to SEQ ID NO: 4, 628, 948, 1126, 1368, or 1548.

[0299] In some embodiments, the recombinant polynucleotide comprises a polynucleotide sequence encoding an engineered protease polypeptide comprising an amino acid sequence having at least 70%, 75%, 80%, 81%, 82%, 83%, 84%, 85%, 86%, 87%, 88%, 89%, 90%, 91%, 92%, 93%, 94%, 95%, 96%, 97%, 98%, or 99%, or more sequence identity to a reference sequence having a substitution or substitution set as set forth in Tables 3.1, 3.2, 4.1, 4.2, 5.1, 5.2, 6.1, 7.1, 8.1, and 9.1, wherein the amino acid positions are relative to the reference sequence corresponding to residues 135-413 of SEQ ID NO: 4, 628, 948, 1126, 1368, or 1548, or relative to the reference sequence corresponding to SEQ ID NO: 4, 628, 948, 1126, 1368, or 1548.

[0300] In some embodiments, the recombinant polynucleotide comprises a polynucleotide sequence encoding an engineered protease polypeptide comprising an amino acid sequence comprising residues 135-413 of an even-numbered SEQ ID NO. of SEQ ID NOs: 6-2242, or an amino acid sequence comprising an even-numbered SEQ ID NO. of SEQ ID NOs: 6-2242.

[0301] In some embodiments, the recombinant polynucleotide comprises a polynucleotide sequence having at least 70%, 75%, 80%, 81%, 82%, 83%, 84%, 85%, 86%, 87%, 88%, 89%, 90%, 91%, 92%, 93%, 94%, 95%, 96%, 97%, 98%, or 99%, or more sequence identity to a reference polynucleotide sequence corresponding to nucleotide residues 403 to 1239 of SEQ ID NO: 3, 627, 947, 1125, 1367, or 1547, or to a reference polynucleotide sequence corresponding to SEQ ID NO: 3, 627, 947, 1125, 1367, or 1547, wherein the recombinant polynucleotide encodes an engineered protease polypeptide.

[0302] In some embodiments, the recombinant polynucleotide comprises a polynucleotide sequence having at least 70%, 75%, 80%, 81%, 82%, 83%, 84%, 85%, 86%, 87%, 88%, 89%, 90%, 91%, 92%, 93%, 94%, 95%, 96%, 97%, 98%, or 99%, or more sequence identity to a reference polynucleotide sequence corresponding to nucleotide residues 403-1239 of an odd-numbered SEQ ID NO. of SEQ ID NOs: 5-2241, or to a reference polynucleotide corresponding to an odd-numbered SEQ ID NO. of SEQ ID NOs: 5-2241, wherein the recombinant polynucleotide encodes an engineered protease polypeptide.

[0303] As discussed herein, the polynucleotide sequence of the recombinant polynucleotide encoding an engineered protease polypeptide is codon optimized. In some embodiments, the polynucleotide sequence is codon optimized for expression in a selected host cell. In some embodiments, the polynucleotide sequence is codon optimized for expression in a bacterial cell, fungal cell, insect cell, or mammalian cell.

[0304] In some embodiments, the recombinant polynucleotide comprises a polynucleotide sequence comprising residues 403-1239, or residues 382-1239 of SEQ ID NO: 5, 7, 9, 11, 13, 15, 17, 19, 21, 23, 25, 27, 29, 31, 33, 35, 37, 39, 41, 43, 45, 47, 49, 51, 53, 55, 57, 59, 61, 63, 65, 67, 69, 71, 73, 75, 77, 79, 81, 83, 85, 87, 89, 91, 93, 95, 97, 99, 101, 103, 105, 107, 109, 111, 113, 115, 117, 119, 121, 123, 125, 127, 129, 131, 133, 135, 137, 139, 141, 143, 145, 147, 149, 151, 153, 155, 157, 159, 161, 163, 165, 167, 169, 171, 173, 175, 177, 179, 181, 183, 185, 187, 189, 191, 193, 195, 197, 199, 201, 203, 205, 207, 209, 211, 213, 215, 217, 219, 221, 223, 225, 227, 229, 231, 233, 235, 237, 239, 241, 243, 245, 247, 249, 251, 253, 255, 257, 259, 261, 263, 265, 267, 269, 271, 273, 275, 277, 279, 281, 283, 285, 287, 289, 291, 293, 295, 297, 299, 301, 303, 305, 307, 309, 311, 313, 315, 317, 319, 321, 323, 325, 327, 329, 331, 333, 335, 337, 339, 341, 343, 345, 347, 349, 351, 353, 355, 357, 359, 361, 363, 365, 367, 369, 371, 373, 375, 377, 379, 381, 383, 385, 387, 389, 391, 393, 395, 397, 399, 401, 403, 405, 407, 409, 411, 413, 415, 417, 419, 421, 423, 425, 427, 429, 431, 433, 435, 437, 439, 441, 443, 445, 447, 449, 451, 453, 455, 457, 459, 461, 463, 465, 467, 469, 471, 473, 475, 477, 479, 481, 483, 485, 487, 489, 491, 493, 495, 497, 499, 501, 503, 505, 507, 509, 511, 513, 515, 517, 519, 521, 523, 525, 527, 529, 531, 533, 535, 537, 539, 541, 543, 545, 547, 549, 551, 553, 555, 557, 559, 561, 563, 565, 567, 569, 571, 573, 575, 577, 579, 581, 583, 585, 587, 589, 591, 593, 595, 597, 599, 601, 603, 605, 607, 609, 611, 613, 615, 617, 619, 621, 623, 625, 627, 629, 631, 633, 635, 637, 639, 641, 643, 645, 647, 649, 651, 653, 655, 657, 659, 661, 663, 665, 667, 669, 671, 673, 675, 677, 679, 681, 683, 685, 687, 689, 691, 693, 695, 697, 699, 701, 703, 705, 707, 709, 711, 713, 715, 717, 719, 721, 723, 725, 727, 7299, 731, 733, 735, 737, 739, 741, 743, 745, 7437, 749, 751, 753, 755, 757, 759, 761, 763, 765, 767, 769, 771, 773, 775, 777, 779, 781, 783, 785, 787, 789, 791, 793, 795, 797, 799, 801, 803, 805, 807, 809, 811, 813, 815, 817, 819, 821, 823, 825, 827, 829, 831, 833, 835, 837, 839, 841, 843, 845, 847, 849, 851, 853, 855, 857, 859, 861, 863, 865, 867, 869, 871, 873, 875, 877, 879, 881, 883, 885, 887, 889, 891, 893, 895, 897, 899, 901, 903, 905, 907, 909, 911, 913, 915, 917, 919, 921, 923, 925, 927, 929, 931, 933, 935, 937, 939, 941, 943, 945, 947, 949, 951, 953, 955, 957, 959, 961, 963, 965, 967, 969, 971, 973, 975, 977, 979, 981, 983, 985, 987, 989, 991, 993, 995, 997, 999, 1001, 1003, 1005, 1007, 1009, 1011, 1013, 1015, 1017, 1019, 1021, 1023, 1025, 1027, 1029, 1031, 1033, 1035, 1037, 1039, 1041, 1043, 1045, 1047, 1049, 1051, 1053, 1055, 1057, 1059, 1061, 1063, 1065, 1067, 1069, 1071, 1073, 1075, 1077, 1079, 1081, 1083, 1085, 1087, 1089, 1091, 1093, 1095, 1097, 1099, 1101, 1103, 1105, 1107, 1109, 1111, 1113, 1115, 1117, 1119, 1121, 1123, 1125, 1127, 1129, 1131, 1133, 1135, 1137, 1139, 1141, 1143, 1145, 1147, 1149, 1151, 1153, 1155, 1157, 1159, 1161, 1163, 1165, 1167, 1169, 1171, 1173, 1175, 1177, 1179, 1181, 1183, 1185, 1187, 1189, 1191, 1193, 1195, 1197, 1199, 1201, 1203, 1205, 1207, 1209, 1211, 1213, 1215, 1217, 1219, 1221, 1223, 1225, 1227, 1229, 1231, 1233, 1235, 1237, 1239, 1241, 1243, 1245, 1247, 1249, 1251, 1253, 1255, 1257, 1259, 1261, 1263, 1265, 1267, 1269, 1271, 1273, 1275, 1277, 1279, 1281, 1283, 1285, 1287, 1289, 1291, 1293, 1295, 1297, 1299, 1301, 1303, 1305, 1307, 1309, 1311, 1313, 1315, 1317, 1319, 1321, 1323, 1325, 1327, 1329, 1331, 1333, 1335, 1337, 1339, 1341, 1343, 1345, 1347, 1349, 1351, 1353, 1355, 1357, 1359, 1361, 1363, 1365, 1367, 1369, 1371, 1373, 1375, 1377, 1379, 1381, 1383, 1385, 1387, 1389, 1391, 1393, 1395, 1397, 1399, 1401, 1403, 1405, 1407, 1409, 1411, 1413, 1415, 1417, 1419, 1421, 1423, 1425, 1427, 1429, 1431, 1433, 1435, 1437, 1439, 1441, 1443, 1445, 1447, 1449, 1451, 1453, 1455, 1457, 1459, 1461, 1463, 1465, 1467, 1469, 1471, 1473, 1475, 1477, 1479, 1481, 1483, 1485, 1487, 1489, 1491, 1493, 1495, 1497, 1499, 1501, 1503, 1505, 1507, 1509, 1511, 1513, 1515, 1517, 1519, 1521, 1523, 1525, 1527, 1529, 1531, 1533, 1535, 1537, 1539, 1541, 1543, 1545, 1547, 1549, 1551, 1553, 1555, 1557, 1559, 1561, 1563, 1565, 1567, 1569, 1571, 1573, 1575, 1577, 1579, 1581, 1583, 1585, 1587, 1589, 1591, 1593, 1595, 1597, 1599, 1601, 1603, 1605, 1607, 1609, 1611, 1613, 1615, 1617, 1619, 1621, 1623, 1625, 1627, 1629, 1631, 1633, 1635, 1637, 1639, 1641, 1643, 1645, 1647, 1649, 1651, 1653, 1655, 1657, 1659, 1661, 1663, 1665, 1667, 1669, 1671, 1673, 1675, 1677, 1679, 1681, 1683, 1685, 1687, 1689, 1691, 1693, 1695, 1697, 1699, 1701, 1703, 1705, 1707, 1709, 1711, 1713, 1715, 1717, 1719, 1721, 1723, 1725, 1727, 1729, 1731, 1733, 1735, 1737, 1739, 1741, 1743, 1745, 1747, 1749, 1751, 1753, 1755, 1757, 1759, 1761, 1763, 1765, 1767, 1769, 1771, 1773, 1775, 1777, 1779, 1781, 1783, 1785, 1787, 1789, 1791, 1793, 1795, 1797, 1799, 1801, 1803, 1805, 1807, 1809, 1811, 1813, 1815, 1817, 1819, 1821, 1823, 1825, 1827, 1829, 1831, 1833, 1835, 1837, 1839, 1841, 1843, 1845, 1847, 1849, 1851, 1853, 1855, 1857, 1859, 1861, 1863, 1865, 1867, 1869, 1871, 1873, 1875, 1877, 1879, 1881, 1883, 1885, 1887, 1889, 1891, 1893, 1895, 1897, 1899, 1901, 1903, 1905, 1907, 1909, 1911, 1913, 1915, 1917, 1919, 1921, 1923, 1925, 1927, 1929, 1931, 1933, 1935, 1937, 1939, 1941, 1943, 1945, 1947, 1949, 1951, 1953, 1955, 1957, 1959, 1961, 1963, 1965, 1967, 1969, 1971, 1973, 1975, 1977, 1979, 1981, 1983, 1985, 1987, 1989, 1991, 1993, 1995, 1997, 1999, 2001, 2003, 2005, 2007, 2009, 2011, 2013, 2015, 2017, 2019, 2021, 2023, 2025, 2027, 2029, 2031, 2033, 2035, 2037, 2039, 2041, 2043, 2045, 2047, 2049, 2051, 2053, 2055, 2057, 2059, 2061, 2063, 2065, 2067, 2069, 2071, 2073, 2075, 2077, 2079, 2081, 2083, 2085, 2087, 2089, 2091, 2093, 2095, 2097, 2099, 2101, 2103, 2105, 2107, 2109, 2111, 2113, 2115, 2117, 2119, 2121, 2123, 2125, 2127, 2129, 2131, 2133, 2135, 2137, 2139, 2141, 2143, 2145, 2147, 2149, 2151, 2153, 2155, 2157, 2159, 2161, 2163, 2165, 2167, 2169, 2171, 2173, 2175, 2177, 2179, 2181, 2183, 2185, 2187, 2189, 2191, 2193, 2195, 2197, 2199, 2201, 2203, 2205, 2207, 2209, 2211, 2213, 2215, 2217, 2219, 2221, 2223, 2225, 2227, 2229, 2231, 2233, 2235, 2237, 2239, or 2241.

[0305] In some embodiments, the recombinant polynucleotide comprises a polynucleotide sequence comprising SEQ ID NO: 5, 7, 9, 11, 13, 15, 17, 19, 21, 23, 25, 27, 29, 31, 33, 35, 37, 39, 41, 43, 45, 47, 49, 51, 53, 55, 57, 59, 61, 63, 65, 67, 69, 71, 73, 75, 77, 79, 81, 83, 85, 87, 89, 91, 93, 95, 97, 99, 101, 103, 105, 107, 109, 111, 113, 115, 117, 119, 121, 123, 125, 127, 129, 131, 133, 135, 137, 139, 141, 143, 145, 147, 149, 151, 153, 155, 157, 159, 161, 163, 165, 167, 169, 171, 173, 175, 177, 179, 181, 183, 185, 187, 189, 191, 193, 195, 197, 199, 201, 203, 205, 207, 209, 211, 213, 215, 217, 219, 221, 223, 225, 227, 229, 231, 233, 235, 237, 239, 241, 243, 245, 247, 249, 251, 253, 255, 257, 259, 261, 263, 265, 267, 269, 271, 273, 275, 277, 279, 281, 283, 285, 287, 289, 291, 293, 295, 297, 299, 301, 303, 305, 307, 309, 311, 313, 315, 317, 319, 321, 323, 325, 327, 329, 331, 333, 335, 337, 339, 341, 343, 345, 347, 349, 351, 353, 355, 357, 359, 361, 363, 365, 367, 369, 371, 373, 375, 377, 379, 381, 383, 385, 387, 389, 391, 393, 395, 397, 399, 401, 403, 405, 407, 409, 411, 413, 415, 417, 419, 421, 423, 425, 427, 429, 431, 433, 435, 437, 439, 441, 443, 445, 447, 449, 451, 453, 455, 457, 459, 461, 463, 465, 467, 469, 471, 473, 475, 477, 479, 481, 483, 485, 487, 489, 491, 493, 495, 497, 499, 501, 503, 505, 507, 509, 511, 513, 515, 517, 519, 521, 523, 525, 527, 529, 531, 533, 535, 537, 539, 541, 543, 545, 547, 549, 551, 553, 555, 557, 559, 561, 563, 565, 567, 569, 571, 573, 575, 577, 579, 581, 583, 585, 587, 589, 591, 593, 595, 597, 599, 601, 603, 605, 607, 609, 611, 613, 615, 617, 619, 621, 623, 625, 627, 629, 631, 633, 635, 637, 639, 641, 643, 645, 647, 649, 651, 653, 655, 657, 659, 661, 663, 665, 667, 669, 671, 673, 675, 677, 679, 681, 683, 685, 687, 689, 691, 693, 695, 697, 699, 701, 703, 705, 707, 709, 711, 713, 715, 717, 719, 721, 723, 725, 727, 7299, 731, 733, 735, 737, 739, 741, 743, 745, 7437, 749, 751, 753, 755, 757, 759, 761, 763, 765, 767, 769, 771, 773, 775, 777, 779, 781, 783, 785, 787, 789, 791, 793, 795, 797, 799, 801, 803, 805, 807, 809, 811, 813, 815, 817, 819, 821, 823, 825, 827, 829, 831, 833, 835, 837, 839, 841, 843, 845, 847, 849, 851, 853, 855, 857, 859, 861, 863, 865, 867, 869, 871, 873, 875, 877, 879, 881, 883, 885, 887, 889, 891, 893, 895, 897, 899, 901, 903, 905, 907, 909, 911, 913, 915, 917, 919, 921, 923, 925, 927, 929, 931, 933, 935, 937, 939, 941, 943, 945, 947, 949, 951, 953, 955, 957, 959, 961, 963, 965, 967, 969, 971, 973, 975, 977, 979, 981, 983, 985, 987, 989, 991, 993, 995, 997, 999, 1001, 1003, 1005, 1007, 1009, 1011, 1013, 1015, 1017, 1019, 1021, 1023, 1025, 1027, 1029, 1031, 1033, 1035, 1037, 1039, 1041, 1043, 1045, 1047, 1049, 1051, 1053, 1055, 1057, 1059, 1061, 1063, 1065, 1067, 1069, 1071, 1073, 1075, 1077, 1079, 1081, 1083, 1085, 1087, 1089, 1091, 1093, 1095, 1097, 1099, 1101, 1103, 1105, 1107, 1109, 1111, 1113, 1115, 1117, 1119, 1121, 1123, 1125, 1127, 1129, 1131, 1133, 1135, 1137, 1139, 1141, 1143, 1145, 1147, 1149, 1151, 1153, 1155, 1157, 1159, 1161, 1163, 1165, 1167, 1169, 1171, 1173, 1175, 1177, 1179, 1181, 1183, 1185, 1187, 1189, 1191, 1193, 1195, 1197, 1199, 1201, 1203, 1205, 1207, 1209, 1211, 1213, 1215, 1217, 1219, 1221, 1223, 1225, 1227, 1229, 1231, 1233, 1235, 1237, 1239, 1241, 1243, 1245, 1247, 1249, 1251, 1253, 1255, 1257, 1259, 1261, 1263, 1265, 1267, 1269, 1271, 1273, 1275, 1277, 1279, 1281, 1283, 1285, 1287, 1289, 1291, 1293, 1295, 1297, 1299, 1301, 1303, 1305, 1307, 1309, 1311, 1313, 1315, 1317, 1319, 1321, 1323, 1325, 1327, 1329, 1331, 1333, 1335, 1337, 1339, 1341, 1343, 1345, 1347, 1349, 1351, 1353, 1355, 1357, 1359, 1361, 1363, 1365, 1367, 1369, 1371, 1373, 1375, 1377, 1379, 1381, 1383, 1385, 1387, 1389, 1391, 1393, 1395, 1397, 1399, 1401, 1403, 1405, 1407, 1409, 1411, 1413, 1415, 1417, 1419, 1421, 1423, 1425, 1427, 1429, 1431, 1433, 1435, 1437, 1439, 1441, 1443, 1445, 1447, 1449, 1451, 1453, 1455, 1457, 1459, 1461, 1463, 1465, 1467, 1469, 1471, 1473, 1475, 1477, 1479, 1481, 1483, 1485, 1487, 1489, 1491, 1493, 1495, 1497, 1499, 1501, 1503, 1505, 1507, 1509, 1511, 1513, 1515, 1517, 1519, 1521, 1523, 1525, 1527, 1529, 1531, 1533, 1535, 1537, 1539, 1541, 1543, 1545, 1547, 1549, 1551, 1553, 1555, 1557, 1559, 1561, 1563, 1565, 1567, 1569, 1571, 1573, 1575, 1577, 1579, 1581, 1583, 1585, 1587, 1589, 1591, 1593, 1595, 1597, 1599, 1601, 1603, 1605, 1607, 1609, 1611, 1613, 1615, 1617, 1619, 1621, 1623, 1625, 1627, 1629, 1631, 1633, 1635, 1637, 1639, 1641, 1643, 1645, 1647, 1649, 1651, 1653, 1655, 1657, 1659, 1661, 1663, 1665, 1667, 1669, 1671, 1673, 1675, 1677, 1679, 1681, 1683, 1685, 1687, 1689, 1691, 1693, 1695, 1697, 1699, 1701, 1703, 1705, 1707, 1709, 1711, 1713, 1715, 1717, 1719, 1721, 1723, 1725, 1727, 1729, 1731, 1733, 1735, 1737, 1739, 1741, 1743, 1745, 1747, 1749, 1751, 1753, 1755, 1757, 1759, 1761, 1763, 1765, 1767, 1769, 1771, 1773, 1775, 1777, 1779, 1781, 1783, 1785, 1787, 1789, 1791, 1793, 1795, 1797, 1799, 1801, 1803, 1805, 1807, 1809, 1811, 1813, 1815, 1817, 1819, 1821, 1823, 1825, 1827, 1829, 1831, 1833, 1835, 1837, 1839, 1841, 1843, 1845, 1847, 1849, 1851, 1853, 1855, 1857, 1859, 1861, 1863, 1865, 1867, 1869, 1871, 1873, 1875, 1877, 1879, 1881, 1883, 1885, 1887, 1889, 1891, 1893, 1895, 1897, 1899, 1901, 1903, 1905, 1907, 1909, 1911, 1913, 1915, 1917, 1919, 1921, 1923, 1925, 1927, 1929, 1931, 1933, 1935, 1937, 1939, 1941, 1943, 1945, 1947, 1949, 1951, 1953, 1955, 1957, 1959, 1961, 1963, 1965, 1967, 1969, 1971, 1973, 1975, 1977, 1979, 1981, 1983, 1985, 1987, 1989, 1991, 1993, 1995, 1997, 1999, 2001, 2003, 2005, 2007, 2009, 2011, 2013, 2015, 2017, 2019, 2021, 2023, 2025, 2027, 2029, 2031, 2033, 2035, 2037, 2039, 2041, 2043, 2045, 2047, 2049, 2051, 2053, 2055, 2057, 2059, 2061, 2063, 2065, 2067, 2069, 2071, 2073, 2075, 2077, 2079, 2081, 2083, 2085, 2087, 2089, 2091, 2093, 2095, 2097, 2099, 2101, 2103, 2105, 2107, 2109, 2111, 2113, 2115, 2117, 2119, 2121, 2123, 2125, 2127, 2129, 2131, 2133, 2135, 2137, 2139, 2141, 2143, 2145, 2147, 2149, 2151, 2153, 2155, 2157, 2159, 2161, 2163, 2165, 2167, 2169, 2171, 2173, 2175, 2177, 2179, 2181, 2183, 2185, 2187, 2189, 2191, 2193, 2195, 2197, 2199, 2201, 2203, 2205, 2207, 2209, 2211, 2213, 2215, 2217, 2219, 2221, 2223, 2225, 2227, 2229, 2231, 2233, 2235, 2237, 2239, or 2241.

[0306] In some embodiments, the recombinant polynucleotide comprises a polynucleotide sequence comprising residues 403-1239, or residues 382-1239 of SEQ ID NO: 627, 947, 1125, 1367, 1547, 1639, or 1709, or a polynucleotide sequence comprising SEQ ID NO: 627, 947, 1125, 1367, 1547, 1639, or 1709.

[0307] In some embodiments, the present disclosure provides a recombinant polynucleotide capable of hybridizing under highly stringent conditions to a reference polynucleotide encoding an engineered protease polypeptide described herein, e.g., a recombinant polynucleotide provided in Tables 3.1, 3.2, 4.1, 4.2, 5.1, 5.2, 6.1, 7.1, 8.1, and 9.1, or a reverse complement thereof. In some embodiments, the present disclosure provides a recombinant polynucleotide capable of hybridizing under highly stringent conditions to a reverse complement of a reference polynucleotide encoding an engineered protease polypeptide described herein, wherein the recombinant polynucleotide hybridizing under stringent conditions encodes an protease polypeptide comprising an amino acid sequence having one or more residue differences as compared to SEQ ID NO: 4, 628, 948, 1126, 1368, or 1548, at residue positions selected from any positions as set forth in Tables 3.1, 3.2, 4.1, 4.2, 5.1, 5.2, 6.1, 7.1, 8.1, and 9.1. In some embodiments, the recombinant polynucleotide that hybridizes under highly stringent conditions comprises a polynucleotide sequence having at least 70%, 75%, 80%, 81%, 82%, 83%, 84%, 85%, 86%, 87%, 88%, 89%, 90%, 91%, 92%, 93%, 94%, 95%, 96%, 97%, 98%, 99% or more sequence identity to a reference polynucleotide sequence corresponding to nucleotide residues 403-1239, or residues 382-1239 of SEQ ID NO: 3, 627, 947, 1125, 1367, or 1547, or to a reference polynucleotide sequence corresponding to SEQ ID NO: 3, 627, 947, 1125, 1367, or 1547. In some additional embodiments, the polynucleotide hybridizing under highly stringent conditions comprises a polynucleotide sequence having at least 75%, 80%, 81%, 82%, 83%, 84%, 85%, 86%, 87%, 88%, 89%, 90%, 91%, 92%, 93%, 94%, 95%, 96%, 97%, 98%, 99% or more sequence identity to at least one polynucleotide reference sequence corresponding to nucleotide residues 403-1239, or residues 382-1239 of a polynucleotide sequence provided in Tables 3.1, 3.2, 4.1, 4.2, 5.1, 5.2, 6.1, 7.1, 8.1, and 9.1, or a polynucleotide sequence provided in Tables 3.1, 3.2, 4.1, 4.2, 5.1, 5.2, 6.1, 7.1, 8.1, and 9.1, wherein the recombinant polynucleotide hybridizing under stringent conditions encodes an engineered protease polypeptide.

[0308] In some embodiments, the recombinant polynucleotide comprises a polynucleotide sequence encoding an engineered protease polypeptide comprising a signal sequence or a signal peptide, as described herein. In some embodiments, the encoded signal sequence or signal peptide is functional in the host cell used or to be used for expression of the engineered protease polypeptide. In some embodiments the encoded signal sequence or signal peptide is fused to a pro-polypeptide form of the engineered protease to form a pre-pro-polypeptide. In some embodiments, the encoded signal sequence or signal peptide is fused to the polypeptide that includes the mature, active form of the engineered protease. In some embodiments, the encoded signal sequence can be a naturally occurring signal sequence or a synthetic signal sequence, including a hybrid signal sequence.

[0309] In some embodiments, the recombinant polynucleotide comprises a polynucleotide sequence encoding an engineered protease polypeptide comprising a fusion polypeptide. In some embodiments, the encoded engineered protease polypeptide can be fused to a variety of polypeptide sequences as described above. In some embodiments, the encoded fusion polypeptide of the engineered protease polypeptides comprises a glycine-histidine or histidine-tag (His-tag), such as provided at the carboxy terminal region of SEQ ID NO: 2. In some embodiments, the encoded fusion protein of the engineered protease polypeptides comprise an epitope tag, such as c-myc, FLAG, V5, or hemagglutinin (HA). In some embodiments, the fusion protein of the engineered protease polypeptides comprises a GST, SUMO, Strep, MBP, or GFP tag.

[0310] In another aspect, the present disclosure further provides an expression vector comprising a recombinant polynucleotide encoding an engineered protease polypeptide described herein, e.g., for expression of the encoded engineered protease polypeptide. In some embodiments, the expression vector comprises one or more control sequences operably linked to the recombinant polynucleotide to regulate the expression of the recombinant polynucleotide and/or encoded polypeptide. In some embodiments, the control sequences include, among others, promoters, leader sequences, polyadenylation sequences, pro-peptide sequences, signal peptide sequences, and transcription terminators. In some embodiments, the control sequences, such as promoters, leader sequences, polyadenylation sequences, pro-peptide sequences, signal peptide sequences, and transcription terminators, are selected depending on the type chosen host cell into which the expression vector is to be introduced.

[0311] In some embodiments, suitable promoters are selected based on the host cells. In some embodiments, the promoter is a heterologous promoter. In some embodiments, for bacterial host cells, suitable promoters include, among others, promoters obtained from the E. coli lac operon, Streptomyces coelicolor agarase gene (dagA), Bacillus subtilis levansucrase gene (sacB), Bacillus licheniformis alpha-amylase gene (amyL), Bacillus stearothermophilus maltogenic amylase gene (amyM), Bacillus amyloliquefaciens alpha-amylase gene (amyQ), Bacillus licheniformis penicillinase gene (penP), Bacillus subtilis xylA and xylB genes, and prokaryotic beta-lactamase gene (see, e.g., Villa-Kamaroff et al., Proc. Natl Acad. Sci. USA, 1978, 75:3727-3731), as well as the tac promoter (see, e.g., DeBoer et al., Proc. Natl Acad. Sci. USA, 1983, 80:21-25). In some embodiments, for fungal host cells, suitable promoters include, among others, promoters obtained from the genes for Aspergillus oryzae TAKA amylase, Rhizomucor miehei aspartic proteinase, Aspergillus niger neutral alpha-amylase, Aspergillus niger acid stable alpha-amylase, Aspergillus niger or Aspergillus awamori glucoamylase (glaA), Rhizomucor miehei lipase, Aspergillus oryzae alkaline protease, Aspergillus oryzae triose phosphate isomerase, Aspergillus nidulans acetamidase, and Fusarium oxysporum trypsin-like protease (see, e.g., WO 96/00787), as well as the NA2-tpi promoter (a hybrid of the promoters from the genes for Aspergillus niger neutral alpha-amylase and Aspergillus oryzae triose phosphate isomerase), and mutant, truncated, and hybrid promoters thereof. Exemplary yeast cell promoters can be from the genes for Saccharomyces cerevisiae enolase (ENO-1), Saccharomyces cerevisiae galactokinase (GAL1), Saccharomyces cerevisiae alcohol dehydrogenase/glyceraldehyde-3-phosphate dehydrogenase (ADH2/GAP), and Saccharomyces cerevisiae 3-phosphoglycerate kinase. In some embodiments, promoters effective in Pichia cells are used. In some embodiments, for insect host cells, suitable promoters include, among others, baculovirus promoters (e.g., P10 and polyhedron promoters), OpIE2 promoter, and Nephotettix cincticeps actin promoters. In some embodiments, for mammalian host cells, suitable promoters include, among others, promoters of cytomegalovirus (CMV), chicken β-actin promoter fused with the CMV enhancer, simian virus 40 (SV40), human phosphoglycerate kinase, beta actin, elongation factor-la or glyceraldehyde-3-phosphate dehydrogenase, or Gallus β-actin.

[0312] In some embodiments, the control sequence is a suitable transcription terminator sequence (i.e., a sequence recognized by a host cell to terminate transcription). In some embodiments, the terminator sequence is operably linked to the 3′ terminus of the nucleic acid sequence encoding the engineered protease polypeptide. Any suitable terminator which is functional in the host cell of choice finds use for the purposes in the present disclosure. In some embodiments, for bacterial expression, suitable transcription terminators include, among others, Rho-dependent terminators that rely on a Rho transcription factor, or Rho-independent, or intrinsic terminators, which do not require a transcription factor. Exemplary bacterial transcription terminators are described in Peters et al., J Mol Biol., 2011, 412(5):793-813. In some embodiments, for fungal host cells, suitable transcription terminators include, among others, terminators from the genes for Aspergillus oryzae TAKA amylase, Aspergillus niger glucoamylase, Aspergillus nidulans anthranilate synthase, Aspergillus niger alpha-glucosidase, and Fusarium oxysporum trypsin-like protease. Exemplary terminators for yeast host cells can be obtained from the genes for Saccharomyces cerevisiae enolase, Saccharomyces cerevisiae cytochrome C (CYC1), and Saccharomyces cerevisiae glyceraldehyde-3-phosphate dehydrogenase. Other useful terminators for yeast host cells are known in the art (see, e.g., Romanos et al., supra). In some embodiments, for mammalian host cells, suitable terminators include, among others, transcription terminators of cytomegalovirus (CMV), Simian virus 40 (SV40), human growth hormone hGH, bovine growth hormone BGH, and human or rabbit beta globulin.

[0313] In some embodiments, the control sequence is also a suitable leader sequence (i.e., a non-translated region of an mRNA that is important for translation by the host cell). In some embodiments, the leader sequence is operably linked to the 5′ terminus of the nucleic acid sequence encoding the engineered protease polypeptide. Any suitable leader sequence that is functional in the host cell of choice find use in expression of the engineered protease polypeptide. Exemplary leader sequences for mammalian and insect cells include, among others, leader sequences of expressed genes (e.g., heat shock protein, myosin, BIP immunoglobulin binding protein, GRP glucose regulated protein, etc.), viral leader sequences (e.g., EMC virus) and synthetic leader sequences, e.g., hTEE-658 and those described in, for example Cao et al., Nature Commun., 2021, 12:4138, incorporated herein by reference. Exemplary leader sequences for fungal expression include, among others, those from Aspergillus oryzae TAKA amylase, and Aspergillus nidulans triose phosphate isomerase. Suitable leaders for yeast host cells are obtained from the genes for Saccharomyces cerevisiae enolase (ENO-1), Saccharomyces cerevisiae 3-phosphoglycerate kinase, Saccharomyces cerevisiae alpha-factor, and Saccharomyces cerevisiae alcohol dehydrogenase/glyceraldehyde-3-phosphate dehydrogenase (ADH2/GAP).

[0314] In some embodiments, the control sequence is also a polyadenylation sequence (i.e., a sequence operably linked to the 3′ terminus of the nucleic acid sequence and which, when transcribed, is recognized by the host cell as a signal to add polyadenosine residues to transcribed mRNA). Any suitable polyadenylation sequence which is functional in the host cell of choice finds use in the present invention. Exemplary polyadenylation sequences for mammalian and insect cells include, among others, those of genes for human and mouse alpha-globin, mouse kappa light chain, chicken ovalbumin, SV40, as wells a synthetic polyA sequences (see, e.g., Clerici et al., eLife, 2017, 6:e33111). Exemplary polyadenylation sequences for fungal host cells include, but not limited to, the genes for Aspergillus oryzae TAKA amylase, Aspergillus niger glucoamylase, Aspergillus nidulans anthranilate synthase, Fusarium oxysporum trypsin-like protease, and Aspergillus niger alpha-glucosidase. Useful polyadenylation sequences for yeast host cells are known in the art (see, e.g., Guo and Sherman, Mol. Cell. Bio., 1995, 15:5983-5990).

[0315] In some embodiments, the control sequence comprises one or more regulatory sequences that facilitate regulation of the expression of the polynucleotide and/or corresponding encoded polypeptide relative to the growth of the host cell. Examples of regulatory systems are those that cause the expression of the gene to be turned on or off in response to a chemical or physical stimulus, including the presence of a regulatory compound. In prokaryotic host cells, suitable regulatory sequences include, among others, the lac, tac, and trp operator systems. In yeast host cells, suitable regulatory systems include, among others the ADH2 system or GAL1 system. In filamentous fungi, suitable regulatory sequences include, among others, the TAKA alpha-amylase promoter, Aspergillus niger glucoamylase promoter, and Aspergillus oryzae glucoamylase promoter. In mammalian cells, suitable regulatory systems include, among others, zinc-inducible sheep metallothionine (MT) promoter, dexamethasone (Dex)-inducible promoter, mouse mammary tumor virus (MMTV) promoter; ecdysone insect promoter, tetracycline-inducible promoter system, RU486-inducible promoter system, and the rapamycin-inducible promoter system.

[0316] In some embodiments, the recombinant expression vector may be any suitable vector (e.g., a plasmid or virus), that can be conveniently subjected to recombinant DNA procedures and bring about the expression of the protease-encoding polynucleotide. The choice of the vector typically depends on the compatibility of the vector with the host cell into which the vector is to be introduced. The vectors may be linear or closed circular plasmids.

[0317] In some embodiments, the expression vector is an autonomously replicating vector (i.e., a vector that exists as an extra-chromosomal entity, the replication of which is independent of chromosomal replication, such as a plasmid, an extra-chromosomal element, a minichromosome, or an artificial chromosome). The vector may contain any means for assuring self-replication. In some alternative embodiments, the vector is one in which, when introduced into the host cell, it is integrated into the genome and replicated together with the chromosome(s) into which it has been integrated. Furthermore, in some embodiments, a single vector or plasmid, or two or more vectors or plasmids which together contain the total DNA to be introduced into the genome of the host cell, and/or a transposon is utilized.

[0318] In some embodiment, recombinant polynucleotides may be provided on a non-replicating expression vector or plasmid. In some embodiments, the non-replicating expression vector or plasmid can be based on viral vectors defective in replication (see, e.g., Travieso et al., Vaccines, 2022, Vol. 7, Article 75).

[0319] In some embodiments, the expression vector contains one or more selectable markers, which permit selection of transformed cells. A “selectable marker” is a gene, the product of which provides for biocide or viral resistance, resistance to heavy metals, prototrophy to auxotrophs, and the like. Examples of bacterial selectable markers include, among others, the dal genes from Bacillus subtilis or Bacillus licheniformis, or markers, which confer antibiotic resistance such as ampicillin, kanamycin, chloramphenicol, or tetracycline resistance. Suitable markers for yeast host cells include, among others, ADE2, HIS3, LEU2, LYS2, MET3, TRP1, and URA3. Selectable markers for use in filamentous fungal host cells include, among others, amdS (acetamidase; e.g., from A. nidulans or A. orzyae), argB (ornithine carbamoyltransferases), bar (phosphinothricin acetyltransferase; e.g., from S. hygroscopicus), hph (hygromycin phosphotransferase), niaD (nitrate reductase), pyrG (orotidine-5′-phosphate decarboxylase; e.g., from A. nidulans or A. orzyae), sC (sulfate adenyltransferase), and trpC (anthranilate synthase), as well as equivalents thereof. Selectable marker for mammalian cells include, among others, chloramphenicol acetyl transferase (CAT), nourseothricin N-acetyl transferase, blasticidin-S deaminase, blastcidin S acetyltransferase, Sh ble (Zeocin® resistance), aminoglycoside 3′-phosphotransferase (neomycin resistance), hph (hygromycin resistance), thymidine kinase, and puromycin N-acetyl-transferase.

[0320] In another aspect, the present disclosure provides a host cell comprising a recombinant polynucleotide encoding an engineered protease polypeptide described herein, the polynucleotide(s) being operably linked to one or more control sequences for expression of the encoded engineered protease polypeptide(s) in the host cell. In some embodiments, the host cell is a bacterial cell, fungal cell, insect cell, or mammalian cell.

[0321] In some embodiments, the host cell is a bacterial cell, including, among others, E. coli, B. subtilis, Vibrio fluvialis, Streptomyces and Salmonella typhimurium cell. Exemplary bacterial host cells also include various Escherichia coli strains (e.g., W3110 (ΔfhuA) and BL21). In some embodiments, the host cell is a fungal cell, such as filamentous fungal cell or yeast cell. n some embodiments, suitable fungal host cells include, among others, Pichia, Saccharomyces, Yarrowia, Kluyveromyces, Aspergillus, Trichoderma, Neurospora, Mucor, Penicillium T. Trichoderma, or Myceliophthora fungal cell. Exemplary fungal host cell includes, among others, Pichia pastoris, Yarrowia lipolytica, Kluyveromyces marxianus, Kluyveromyces lactis, Aspergillus niger, Aspergillus oryzae, Aspergillus fumigatus Trichoderma reesei. Neurospora crassa, Mucor circinelloides, Penicillium chrysogenum T. reesei, Trichoderma harzianum, Saccharomyces cerevisiae, or Myceliophthora thermophile. In some embodiments, the host cell is an insect cell. In some embodiments, a suitable insect host cell is a lepidopteran or dipteran insect cell. Exemplary insect host cell includes, among others, Sf9 cell, Sf21 cell, Schneider 2 cell, and BTI-TN-5B1-4 (High Five) cell. In some embodiments, the host cell is a mammalian cell. In some embodiments, the host cell is a human cell or rodent cell. Exemplary mammalian cells include, among others, Expi293, HeLa, U2OS, A549, HT1080, CAD, P19, NIH 3T3, L929, Hek 293, 293F, 293E, 293T, COS, Vero, NS0, Sp2/0 cell, DUKX-X11, MCF-7, Y79, SO-Rb50, Hep G2, J558L, and CHO cell.

[0322] In some embodiments, the host cell expresses an engineered protease polypeptide described herein. In some embodiments, the engineered protease polypeptide expressed in the host cell is a pre-pro-polypeptide or pre-pro-enzyme form of the engineered protease polypeptide. In some embodiments, the engineered protease polypeptide expressed in the host cell is a pro-polypeptide or pro-enzyme form of an engineered protease polypeptide. In some embodiments, the engineered protease polypeptide expressed in the host cell is a proteolytically active polypeptide or an active protease of the engineered protease polypeptide. In some embodiments, the engineered protease polypeptide expressed in the host cell is mature, active protease of the engineered protease polypeptide.

[0323] In some embodiments, any suitable method for introducing polynucleotides for expression of the engineered protease polypeptides into cells will find use for the purposes herein. Suitable techniques include, among others electroporation, biolistic particle bombardment, liposome mediated transfection, calcium chloride transfection, and protoplast fusion.

[0324] In some embodiments, recombinant polynucleotides encoding the engineered protease polypeptide can be produced using any suitable methods known the art. For example, a wide variety of different mutagenesis techniques are available to the skilled artisan. Methods are available to make specific substitutions at defined amino acids (site-directed), specific or random mutations in a localized region of the gene (region-specific), or random mutagenesis over the entire gene (e.g., saturation mutagenesis). Numerous methods known to those in the art to generate polypeptide variants, include, by way of example and not limitation, site-directed mutagenesis of single-stranded DNA or double-stranded DNA using PCR, cassette mutagenesis, gene synthesis, error-prone PCR, shuffling, and chemical saturation mutagenesis. Non-limiting examples of methods used for DNA and protein engineering are provided in the following references: U.S. Pat. Nos. 6,117,679; 6,420,175; 6,376,246; 6,586,182; 7,747,391; 7,747,393; 7,783,428; and 8,383,346. After the variants are produced, they can be screened for any desired property (e.g., increased activity, increased thermal activity, increased stability, increased thermostability, increased resistance to gastric proteases, increased pH stability, etc.).

[0325] In some embodiments, the engineered protease polypeptides with the properties disclosed herein can be obtained by subjecting the polynucleotide encoding the naturally occurring or engineered protease polypeptide to a suitable mutagenesis and/or directed evolution methods known in the art, such as provided in the Examples. An exemplary directed evolution technique is mutagenesis and/or DNA shuffling (see, e.g., Stemmer, Proc. Natl. Acad. Sci. USA, 1994, 91:10747-10751; WO 95/22625; WO 97/0078; WO 97/35966; WO 98/27230; WO 00/42651; WO 01/75767 and U.S. Pat. No. 6,537,746). Other directed evolution procedures that can be used include, among others, staggered extension process (StEP), in vitro recombination (see, e.g., Zhao et al., Nat. Biotechnol., 1998, 16:258-261), mutagenic PCR (see, e.g., Caldwell et al., PCR Methods Appl., 1994, 3:S136-S140), and cassette mutagenesis (see, e.g., Black et al., Proc. Natl. Acad. Sci. USA, 1996, 93:3525-3529).

[0326] Guidance for other suitable mutagenesis and directed evolution methods are described in, among others, U.S. Pat. Nos. 5,605,793, 5,811,238, 5,830,721, 5,834,252, 5,837,458, 5,928,905, 6,096,548, 6,117,679, 6,132,970, 6,165,793, 6,180,406, 6,251,674, 6,265,201, 6,277,638, 6,287,861, 6,287,862, 6,291,242, 6,297,053, 6,303,344, 6,309,883, 6,319,713, 6,319,714, 6,323,030, 6,326,204, 6,335,160, 6,335,198, 6,344,356, 6,352,859, 6,355,484, 6,358,740, 6,358,742, 6,365,377, 6,365,408, 6,368,861, 6,372,497, 6,337,186, 6,376,246, 6,379,964, 6,387,702, 6,391,552, 6,391,640, 6,395,547, 6,406,855, 6,406,910, 6,413,745, 6,413,774, 6,420,175, 6,423,542, 6,426,224, 6,436,675, 6,444,468, 6,455,253, 6,479,652, 6,482,647, 6,483,011, 6,484,105, 6,489,146, 6,500,617, 6,500,639, 6,506,602, 6,506,603, 6,518,065, 6,519,065, 6,521,453, 6,528,311, 6,537,746, 6,573,098, 6,576,467, 6,579,678, 6,586,182, 6,602,986, 6,605,430, 6,613,514, 6,653,072, 6,686,515, 6,703,240, 6,716,631, 6,825,001, 6,902,922, 6,917,882, 6,946,296, 6,961,664, 6,995,017, 7,024,312, 7,058,515, 7,105,297, 7,148,054, 7,220,566, 7,288,375, 7,384,387, 7,421,347, 7,430,477, 7,462,469, 7,534,564, 7,620,500, 7,620,502, 7,629,170, 7,702,464, 7,747,391, 7,747,393, 7,751,986, 7,776,598, 7,783,428, 7,795,030, 7,853,410, 7,868,138, 7,783,428, 7,873,477, 7,873,499, 7,904,249, 7,957,912, 7,981,614, 8,014,961, 8,029,988, 8,048,674, 8,058,001, 8,076,138, 8,108,150, 8,170,806, 8,224,580, 8,377,681, 8,383,346, 8,457,903, 8,504,498, 8,589,085, 8,762,066, 8,768,871, 9,593,326, 9,665,694, 9,684,771, and all related PCT and non-US counterparts; Ling et al., Anal. Biochem., 1997, 254(2):157-78; Dale et al., Meth. Mol. Biol., 1996, 57:369-74; Smith, Ann. Rev. Genet., 1985, 19:423-462; Botstein et al., Science, 1985, 229:1193-1201; Carter, Biochem. J., 1986, 237:1-7; Kramer et al., Cell, 1984, 38:879-887; Wells et al., Gene, 1985, 34:315-323; Minshull et al., Curr. Op. Chem. Biol., 1999, 3:284-290; Christians et al., Nat. Biotechnol., 1999, 17:259-264; Crameri et al., Nature, 1998, 391:288-291; Crameri, et al., Nat. Biotechnol., 1997, 15:436-438; Zhang et al., Proc. Nat. Acad. Sci. U.S.A., 1997, 94:4504-4509; Crameri et al., Nat. Biotechnol., 1996, 14:315-319; Stemmer, Nature, 1994, 366:389-391; Stemmer, Proc. Nat. Acad. Sci. USA, 1994, 91:10747-10751; EP 3 049 973; WO 95/22625; WO 97/0078; WO 97/35966; WO 98/27230; WO 00/42651; WO 01/75767; WO 2009/152336; and WO 2015/048573, all of which are incorporated herein by reference.

[0327] In some embodiments, the clones obtained following mutagenesis treatment are screened by subjecting polypeptide preparations to a defined treatment conditions or assay conditions (e.g., temperature, pH condition, gastric protease, etc.) and measuring polypeptide activity after the treatments or other suitable assay conditions. Clones containing a polynucleotide encoding the polypeptide of interest are then isolated, the polynucleotide sequenced to identify the nucleotide sequence changes (if any), and used to express the polypeptide in a host cell. Measuring polypeptide activity from the expression libraries can be performed using any suitable method known in the art and as described in the Examples.

[0328] For engineered polypeptides of known sequence, the polynucleotides encoding the subject polypeptide can be prepared by standard solid-phase methods, according to known synthetic methods. In some embodiments, fragments of up to about 100 bases can be individually synthesized, then joined (e.g., by enzymatic or chemical ligation methods, or polymerase mediated methods) to form any desired continuous sequence. For example, polynucleotides and oligonucleotides disclosed herein can be prepared by chemical synthesis using the classical phosphoramidite method (see, e.g., Beaucage et al., Tet. Lett., 1981, 22:1859-69; and Matthes et al., EMBO J., 1984, 3:801-05), as it is typically practiced in automated synthetic methods. According to the phosphoramidite method, oligonucleotides are synthesized, e.g., in an automatic DNA synthesizer, purified, annealed, ligated, and cloned in appropriate vectors.

[0329] In some embodiments, a method for preparing the engineered protease polypeptide can comprise: (a) synthesizing a polynucleotide encoding a polypeptide comprising an amino acid sequence selected from the amino acid sequence of any engineered protease polypeptide as described herein, and (b) expressing the engineered protease polypeptide encoded by the polynucleotide. In some embodiments of the method, the amino acid sequence encoded by the polynucleotide can optionally have one or several (e.g., up to 3, 4, 5, or up to 10) amino acid residue deletions, insertions and/or substitutions. In some embodiments, the amino acid sequence has optionally 1-2, 1-3, 1-4, 1-5, 1-6, 1-7, 1-8, 1-9, 1-10, 1-15, 1-20, 1-21, 1-22, 1-23, 1-24, 1-25, 1-30, 1-35, 1-40, 1-45, or 1-50 amino acid residue deletions, insertions and/or substitutions. In some embodiments, the amino acid sequence has optionally 1, 2, 3, 4, 5, 6, 7, 8, 9, 10, 11, 12, 13, 14, 15, 16, 17, 18, 19, 20, 21, 22, 23, 24, 25, 30, 30, 35, 40, 45, or 50 amino acid residue deletions, insertions and/or substitutions. In some embodiments, the amino acid sequence has optionally 1, 2, 3, 4, 5, 6, 7, 8, 9, 10, 11, 12, 13, 14, 15, 16, 18, 20, 21, 22, 23, 24, or 25 amino acid residue deletions, insertions and/or substitutions. In some embodiments, the substitutions are conservative or non-conservative substitutions.

### Methods of Preparing Engineered Protease Polypeptide and Proteolytically Active Polypeptide

[0330] In another aspect, the present disclosure provides a method of producing an engineered protease polypeptide, where the method comprises culturing a host cell comprising an expression vector capable of expressing a polynucleotide encoding the engineered protease polypeptide under suitable conditions such that the engineered protease polypeptide is expressed or produced. Appropriate culture media and growth conditions for various host cells are known in the art.

[0331] In some embodiments, the method further comprises a step of isolating the expressed protease polypeptide, such as from the culture medium and/or cells. In some embodiments, the method further comprises purifying the expressed engineered protease polypeptide. In some embodiments, isolating and/or purifying the engineered protease polypeptide can be done by using any one or more of the known techniques for protein purification, including, among others, detergent lysis, sonication, filtration, salting-out, selective precipitation, ultra-centrifugation, and chromatography.

[0332] Chromatographic techniques for isolation and/or purification of polypeptides and proteins include, among others, reverse phase chromatography, high-performance liquid chromatography, ion-exchange chromatography, hydrophobic-interaction chromatography, size-exclusion chromatography, gel electrophoresis, and affinity chromatography. Conditions for purifying a particular polypeptide may depend, in part, on factors such as net charge, hydrophobicity, hydrophilicity, molecular weight, molecular shape, etc., and will be apparent to those having skill in the art. In some embodiments, affinity techniques may be used to isolate the engineered protease polypeptides. For affinity chromatography purification, any antibody that specifically binds the engineered protease polypeptide of interest can be used. Where the engineered protease includes a fusion polypeptide that includes an affinity tag, such as a His-tag, standard affinity methods for the particular fusion polypeptide can be used.

[0333] In some embodiments, the present disclosure provides a method of preparing a proteolytically active polypeptide or an active protease of an engineered protease polypeptide. In some embodiments, a method of preparing a proteolytically active protease polypeptide comprises incubating or reacting an engineered protease polypeptide described herein under suitable conditions such that the proteolytically active protease or active protease is produced. In some embodiments, the method is used to prepare a mature proteolytically active polypeptide or active protease of an engineered protease polypeptide.

[0334] In some embodiments, the proteolytically active polypeptide or active protease is prepared from an engineered protease polypeptide that contains a pro-domain of the protease. In some embodiments, the proteolytically active polypeptide or active protease is prepared from a pro-polypeptide form of the engineered protease polypeptide. In some embodiments, the proteolytically active polypeptide or active protease prepared by the method has an amino terminus within amino acid residues 128-135, particularly where the amino terminus is at amino acid residue 128 or 135, wherein the amino acid positions are numbered with respect to SEQ ID NO: 2, or an equivalent position for any engineered protease polypeptide variant described herein.

[0335] In some embodiments, the suitable conditions for preparing the proteolytically active polypeptide or active protease is sufficient for activation of autoproteolysis of the appropriate engineered protease polypeptide. Without being bound by any theory of operation, an engineered protease polypeptide containing a pro-domain can undergo auto-proteolysis to generate a proteolytically active polypeptide or an active protease in which autoproteolysis occurs at least at amino acid position 128 and/or 135, where the amino acid positions are numbered with respect to SEQ ID NO: 2, or an equivalent position for any of the engineered protease polypeptide variants described herein.

[0336] In some embodiments, the proteolytically active polypeptide or active protease can be prepared by subjecting the pro-polypeptide form of the engineered protease polypeptide to another protease that can cleave the pro-polypeptide and separate the pro-domain from the protease domain. In some embodiments, the other protease comprises a proteolytically active polypeptide or active protease of an engineered protease polypeptide described herein. Exemplary conditions for auto-proteolysis or proteolysis with an engineered protease are provided in the Examples.

### Compositions and Pharmaceutical Compositions

[0337] In a further aspect, the present disclosure provides a composition comprising an engineered protease polypeptide. In some embodiments, the composition comprises an engineered protease polypeptide, wherein the engineered protease polypeptide is in the form of a pre-pro-polypeptide or pre-pro-enzyme; a pro-polypeptide or pro-enzyme; or a proteolytically active polypeptide or active protease, including mature, proteolytically active polypeptide, as described herein. In some embodiments, the pro-polypeptide or pro-enzyme form of the engineered protease polypeptide if a form with reduced or low protease activity is desired, for example for storage and/or prior to activation of the protease.

[0338] In some embodiments, the composition comprises an engineered protease polypeptide as a dietary/nutritional supplement, or in combination with food or drink. In some embodiments, the engineered protease polypeptide may be used in any suitable edible enzyme delivery matrix. In some embodiments, engineered protease polypeptide are present in an edible enzyme delivery matrix designed for rapid dispersal of the protease within the digestive tract of an animal or subject upon ingestion of the polypeptide. In some embodiments, an engineered protease polypeptide is mixed or admixed with protein-containing food or a drink. Non-limiting examples of such foods include a protein-containing powder, a spread, a spray, a sauce, a dip, a cream, dressing, cheese, butter, margarines, spreads, butter, dairy products, nut butters, seed butters, kernel butters, peanut butter, vegetables, meats, poultry, and fish. In some embodiments, the engineered protease polypeptide is mixed or admixed with infant formula or with breast milk.

[0339] In some embodiments, the engineered protease is formulated as a pharmaceutical composition. Depending on the mode of administration, the compositions comprise a therapeutically effective amount of an engineered protease polypeptide and can be in the form of a solid, semi-solid, or liquid. In some embodiments, the pharmaceutical composition comprises an engineered protease polypeptide, and a pharmaceutically acceptable carrier, excipient, or diluent. The carrier can be a diluent, adjuvant, excipient, or vehicle with which the therapeutic is administered. Such pharmaceutical carriers can be sterile liquids, such as water and oils, including those of petroleum, animal, vegetable or synthetic origin, such as peanut oil, soybean oil, mineral oil, sesame oil and the like. Saline solutions and aqueous dextrose and glycerol solutions can also be employed as liquid carriers.

[0340] In some embodiments, the excipient includes, among others, starch, glucose, lactose, sucrose, gelatin, malt, rice, flour, chalk, silica gel, sodium stearate, glycerol monostearate, talc, sodium chloride, dried skim milk, glycerol, propylene, glycol, water, ethanol and the like. The composition, if desired, can also contain appropriate amounts of wetting or emulsifying agents, and/or pH buffering agents. These compositions can take the form of solutions, suspensions, emulsion, tablets, pills, capsules, powders, sustained-release formulations and the like. Examples of suitable pharmaceutical carriers are described in Remington: The Science and Practice of Pharmacy, 23^{rd} Ed, A. Adejare ed., Academic Press, 2020, incorporated in its entirety by reference herein. Such compositions will contain a therapeutically effective amount of the engineered protease polypeptide, preferably in purified form, together with a suitable amount of carrier and/or excipient so as to provide the form for proper administration to the subject.

[0341] In some embodiments, the engineered protease polypeptide is formulated for use as oral pharmaceutical compositions (e.g., for oral administration). Any suitable format for use in delivering the protease polypeptide may be used, including but not limited to pills, tablets, gel tabs, capsules, lozenges, dragees, powders, soft gels, sol-gels, gels, emulsions, sprays, ointments, liniments, creams, pastes, jellies, demulcents, sticks, suspensions (including but not limited to oil-based suspensions, oil-in water emulsions, etc.), slurries, syrups, controlled release formulations. For oral administration, the pharmaceutical composition can be used alone or in combination with appropriate additives to make the tablets, powders, granules, capsules, syrups, liquids, suspensions, etc. For example, solid oral forms of the composition can be prepared with conventional additives, disintegrators, lubricants, diluents, buffering agents, moistening agents, preservatives and flavoring agents. Non-limiting examples of excipients include sugars (e.g., lactose, sucrose, mannitol, and/or sorbitol), starches (e.g., corn, wheat, rice, potato, or other plant starch), cellulose (e.g., methyl cellulose, hydroxypropylmethyl cellulose, sodium carboxy-methylcellulose), gums (e.g., arabic, tragacanth, guar, etc.), and/or proteins (e.g., gelatin, collagen, etc.). Additional components in oral formulations may include coloring and or sweetening agents (e.g., glucose, sucrose, and mannitol) and lubricating agents (e.g., magnesium stearate), as well as enteric coatings (e.g., methacrylate polymers, hydroxyl propyl methyl cellulose phthalate, and/or any other suitable enteric coating known in the art). In some embodiments, the formulation releases the enzyme(s) in the stomach of the subject so that target proteins can be degraded by the engineered protease.

[0342] In some embodiments, the engineered protease polypeptide is provided as a unit dose formulation. For example, and without limitation, the unit dose may be present in a tablet, a capsule, and the like. The unit dose may be in solid, liquid, powder, or any other form. A unit dose formulation of the pharmaceutical composition will allow for appropriate dosing while avoiding potential negative side effects of administering an excessive amount of the composition.

[0343] In some embodiments, the engineered protease polypeptide or composition thereof, including as a pharmaceutical composition, can be lyophilized from an aqueous solution, optionally in the presence of appropriate buffers (e.g., phosphate, citrate, histidine, imidazole buffers) and excipients (e.g., cryoprotectants such as sucrose, lactose, trehalose, etc.). Lyophilizates can optionally be blended with excipients and made into different forms.

[0344] In some embodiments, the composition, including a pharmaceutical composition, further comprises a lipase. In some embodiments, the lipase can be any lipase suitable for treating exocrine pancreatic insufficiency. In some embodiments, the composition, including a pharmaceutical composition further comprises an amylase. In some embodiments, the amylase can be any amylase suitable for treating exocrine pancreatic insufficiency. In some embodiments, the composition, including a pharmaceutical composition, further comprises a lipase and an amylase. In some embodiments, the protease and amylase are suitable for treating pancreatic insufficiency.

### Uses and Methods

[0345] In another aspect, the present disclosure provides use of the engineered protease polypeptides for degrading a target protein or polypeptide. In some embodiments, a method of degrading a target protein or polypeptide comprises contacting a target protein or polypeptide with an engineered protease polypeptide described under suitable conditions for proteolytically active polypeptide or an active protease of the engineered protease polypeptide to degrade the target protein or polypeptide. In some embodiments, the target protein or polypeptide comprises a mixture or proteins and/polypeptides. In some embodiments, the mixture of protein and/or polypeptides is protein(s) in food or drink.

[0346] In some embodiments, the engineered protease polypeptide is a pro-polypeptide form, and the suitable conditions promote formation of the proteolytically active polypeptide or active protease of the engineered protease polypeptide. In some embodiments, the engineered protease polypeptide is the proteolytically active protease or active protease, e.g., protease polypeptide comprising amino acid residues 135-413 or 128-413, that does not need any further activation.

[0347] In some embodiments, the engineered protease polypeptides are applied in the treatment of exocrine pancreatic insufficiency or a deficiency in pancreatic enzymes required for efficient digestion of proteins in food. In some embodiments, a method of treating a deficiency in pancreatic enzymes required for efficient digestion of proteins in food, comprises administering to a subject in need thereof an effective amount of an engineered protease polypeptide or a pharmaceutical composition thereof described herein. In some embodiments, the subject is a human patient with exocrine pancreatic insufficiency.

[0348] In some embodiments, the engineered protease polypeptide administered is the pro-polypeptide form, e.g., protease polypeptide of residues 1-413 of an engineered protease polypeptide, where the engineered protease polypeptide is activated to the proteolytically active polypeptide or active protease prior to administration, or administered under conditions that result in activation to the proteolytically active polypeptide or active protease. In some embodiments, the engineered protease polypeptide administered is the proteolytically active polypeptide or the active protease, e.g., protease polypeptide comprising residues 128-413 or 135-413 of an engineered protease polypeptide.

[0349] In some embodiments, the engineered protease polypeptide or pharmaceutical composition thereof is administered immediately prior to, concurrently with, or subsequent to consumption of a protein-containing food or drink. In some embodiments, the engineered protease polypeptide is preferably administered concurrently with the ingestion of the food or drink.

[0350] In some embodiments, the subject for treatment is a human infant. In some embodiments, the engineered protease polypeptide is administered with infant formula or during breast feeding.

[0351] In some embodiments, the subject for treatment is a child, e.g., 12 months or older and up to 4 years old. In some embodiments, the subject for treatment is a child older than 4 years old, or a young adult, up to 18 years of age. In some embodiments, the subject for treatment is a human adult.

[0352] In some embodiments, the present disclosure provides use of an engineered protease polypeptide described herein for treating exocrine pancreatic insufficiency.

[0353] In some embodiments, the present disclosure provides use of an engineered protease polypeptide described herein in the preparation of a medicament for treating exocrine pancreatic insufficiency.

### EXAMPLES

[0354] The following Examples, including experiments and results achieved, are provided for illustrative purposes only and are not to be construed as limiting the present invention. In the embodiments herein, the abbreviations and technical terms are those commonly used and known in the art.

### Example 1

### Protease Gene Acquisition and Construction of Expression Vectors

[0355] A wild-type protease (WP_077617485) of Bacillus sinesaloumensis Marseille P3516 from the serine peptidase S8 family with a C-terminal 6×-histidine tag (SEQ ID NO: 2) was codon optimized for expression in E. coli and cloned into an E. coli expression vector system (see, e.g., US Pat. Application WO2021/061915A2). In addition, in some embodiments, expression vectors lacking antimicrobial resistance markers are used. The plasmid construct was transformed into an E. coli strain derived from W3110. Directed evolution techniques were used to generate libraries of gene variants from this plasmid construct (see e.g., U.S. Pat. No. 8,383,346, and WO2010/144103) as well as its derivatives.

### Example 2

### High-Throughput (HTP) Growth of Protease Variants and Screening Conditions

2.1: HTP Growth of Bacillus sinesaloumensis Marseille P3516 Protease and Variants

[0356] Transformed E. coli cells were selected by plating onto Luria Broth (LB) agar plates containing 1% glucose with selection. After overnight incubation at 37° C., colonies were placed into the wells of 96-well shallow flat bottom plates (NUNC™, Thermo-Scientific) filled with 180 μl/well LB supplemented with 1% glucose and selection (e.g., chloramphenicol). The cultures were allowed to grow overnight for 18-20 hours in a shaker (200 rpm, 30° C., and 85% relative humidity; Kuhner).

[0357] Overnight growth samples (20 μL) were transferred into Costar 96-well deep plates filled with 380 μL of Terrific Broth (TB) supplemented with a selection. The plates were incubated for 130 minutes in a shaker (250 rpm, 30° C., and 85% relative humidity; Kuhner). The cells were then induced with 40 μL of 10 mM isopropylthiogalactoside (IPTG) in sterile water and incubated overnight for 20-24 hours in a shaker (250 rpm, 30° C., and 85% relative humidity; Kuhner). The cells were pelleted (4000 rpm×20 min), the supernatants were discarded, and the cells were frozen at −80° C. prior to analysis.

### 2.2: Lysis of HTP Cell Pellets

[0358] For cell lysis, 200, 300, or 400 μL of lysis buffer (1×PBS, 1 mg/ml lysozyme, 0.5 mg/ml polymyxin B sulfate, 0.4 U/mL DNase I from New England Biolabs) was added to the cell pellets. The mixture was agitated for 1.5-2 hours at room temperature, and centrifuged (4000 rpm×15 min) prior to further analysis. At this stage, the sample is referred to as “clarified lysate.” Sometimes additional dilutions of clarified lysate were performed in PBS buffer prior to subsequent challenges and activity assays.

### 2.4: Activation of Clarified Lysates

[0359] To activate the protease, a small quantity of previously purified and activated protease was added to the clarified lysate to degrade the pro-peptide and facilitate the activation of the protease present in the lysate. Clarified lysate was mixed 1:1 with PBS containing 0.02 g/L of purified protease in a BioRad hardshell plate (final concentration 50% clarified lysate and 0.01 g/L purified protease). Samples were mixed and incubated at 37° C. in a thermocycler for 16+ hours. At this stage, the sample is referred to as “activated lysate.” Sometimes additional dilutions of activated lysate were performed in PBS buffer prior to subsequent challenges and activity assays.

2.5: Analysis of Activated Lysates for Protease Activity with Casein Activity Assay

[0360] The activity of protease variants was determined by measuring the degradation of Casein using an activity assay adapted for high throughput from the United States Pharmacopeia protease assay. For this assay, 80 μL of reaction buffer (50 mM Potassium Phosphate buffer, pH 7.5, or 100 mM sodium phosphate buffer, pH 6.5) was added to a Costar deepwell plate. Next, 80 μL of 15 g/L casein sodium salt dissolved in water was added to the reaction plate. Finally, 40 μL of the sample to be analyzed was added to the reaction plate, starting the reaction. Reaction plates were incubated at 40° C. in a multitron shaker with shaking at 400 rpm for 1 hour. After 1 hour, 200 μL of 50 g/L of trichloroacetic acid (TCA) was added to the reaction plate, simultaneously quenching the reaction and precipitating out any whole proteins. Quenched reactions were thoroughly shaken and centrifuged to pellet out any precipitated protein. After centrifugation, 200 μL of supernatant was transferred to a Greiner UV-star flat bottom plate and the absorbance was read at 280 nm using a Molecular Devices SpectraMax M2 plate reader. To ensure that samples did not saturate the assay, samples were often diluted prior to analysis based on a pre-determined dilution factor (up to 128×). The term “unchallenged activity” is defined as protease activity without any prior challenge described in Examples 2.7-2.8.

2.6: Analysis of Clarified Lysates for Protease Activity with BODIPY-Casein Assay

[0361] In some cases, the activity of protease variants was determined by measuring the degradation of Casein using the EnzChek Protease Assay Kit (Thermo Fisher Scientific). For this assay, 90 μL of 10 μg/mL BODIPY-casein substrate in aqueous buffer (100 mM sodium phosphate buffer, pH 7) was added to a 96-well, opaque, black microtiter plate (Costar). To start the assay, 10 μL of sample (challenged, diluted cell lysate) was added to the reaction mix and incubated at 37° C. in a multitron shaker with shaking at 400 rpm. After 1 hour, plates were read on a Molecular Devices SpectraMax M2 plate reader for fluorescence (Excitation: 485, Emission: 530). To ensure that samples did not saturate the assay, samples were diluted in assay buffer prior to analysis based on a pre-determined dilution factor (up to 250×). The term “unchallenged activity” is defined as protease activity without any prior challenge described in Examples 2.8.

2.7: HTP Analysis of Activated Lysates Pre-Incubated with Heat Challenge

[0362] Thermostability of protease variants were assessed as described herein. Clarified lysate or activated lysate was transferred to a PCR plate (BioRad) and incubated for 1 hour at 63° C., 64° C. or 71° C. in a thermocycler. After incubation, samples were centrifuged and the supernatant was analyzed for residual protease activity as described in Example 2.5.

### 2.8: HTP Analysis of Clarified Lysates or Activated Lysates Pre-Incubated at Reduced pH in the Presence of Pepsin

[0363] The activities of protease variants were determined after pre-incubation at low pH in the presence of pepsin to simulate the environment of the stomach. Clarified lysate, activated lysate, or activated lysate further diluted in PBS was mixed 1:1 with McIlvaine buffer, pH 2.8-4.5, +4000 U/mL (1.6 mg/mL) pepsin from porcine gastric mucosa (Sigma) in a PCR plate (BioRad), for a final challenge pH 2.8-4.5 and a final pepsin concentration of 2000 U/mL (0.8 mg/mL). Samples were mixed then incubated for 1 hour at 37° C. in a thermocycler. To stop the challenges, samples were mixed 1:1 with 400 mM sodium phosphate buffer, pH 7.0, neutralizing the pH and inactivating the pepsin. Neutralized challenge samples were then further diluted and analyzed for residual protease activity as described in Examples 2.5-2.6.

### Example 3

Screening Results of Protease Variants Derived from SEQ ID NO: 4
3.1: HTP Growth of Bacillus sinesaloumensis Marseille P3516 Protease and Variants

[0364] The polynucleotide sequence of SEQ ID NO: 1 encoding the polypeptide of SEQ ID NO: 2 was subcloned into a different E. coli expression vector system (see e.g., US Pat. Application WO2021061915A2) and was used as the backbone for the construction of protease variants in this Example. Within the Sequence Listing, for purposes of consistency in description, the protease variants studied in this Example are represented as a fragment (residues 1-413, SEQ ID NO: 4) of their full-length sequence of actual variants examined. In this Example, the actual variants studied include residues 414-533 of SEQ ID NO: 2 and the His-tag sequence (see FIG. 1). New variants were generated by known protein evolution techniques and the variants screened using the BODIPY-casein activity assay after a one hour pre-incubation at pH 4.5 in the presence of pepsin, as described in Example 2. Some variants were subjected to a modified pre-incubation with more lysate present in the challenge prior to screening with the BODIPY-casein activity assay. Analysis of the data relative to SEQ ID NO: 4 is listed in Table 3.1. Some variants from these libraries were assayed in triplicate in the BODIPY-casein activity assay after no prior challenge, and after a 1 hour pre-incubation at pH 4.5 in the presence of pepsin, as described in Example 2. Analysis of the average data relative to SEQ ID NO: 4 is listed in Table 3.2.

TABLE 3.1
Protease activity relative to SEQ ID NO: 4

| | | High lysate pH | |
|---|---|---|---|
| | | 4.5 and Pepsin | pH 4.5 and Pepsin |
| | Amino Acid | Challenge | Challenge |
| SEQ ID | Differences | Improvement | Improvement |
| NO: | (Relative to | Relative to | Relative to |
| (nt/aa) | SEQ ID NO: 4) | SEQ ID NO: 4 | SEQ ID NO: 4¹ |
| 3/4 | | + | + |
| 5/6 | N185F | ++ | |
| 7/8 | Q134I | ++ | |
| 9/10 | G129T | +++ | |
| 11/12 | A135C | ++ | |
| 13/14 | T184A | ++ | |
| 15/16 | G129R | +++ | |
| 17/18 | T132Y | ++ | |
| 19/20 | L186R | ++ | |
| 21/22 | G193T | + | |
| 23/24 | G263P | ++ | |
| 25/26 | D370C | + | |
| 27/28 | D45Y/Q134W | ++ | |
| 29/30 | N185M | + | |
| 31/32 | Q199K | ++ | |
| 33/34 | N368T | +++ | |
| 35/36 | S161E | +++ | |
| 37/38 | N141T | ++ | |
| 39/40 | Q267L | ++ | |
| 41/42 | A179S | ++ | |
| 43/44 | N185V | + | |
| 45/46 | G264L | +++ | |
| 47/48 | Q199C | + | |
| 49/50 | S160M | ++ | |
| 51/52 | P138Q | + | |
| 53/54 | A131Y | + | |
| 55/56 | T184D | + | |
| 57/58 | S372R | + | |
| 59/60 | Q134L | ++ | |
| 61/62 | D370R | ++ | |
| 63/64 | D370I | ++ | |
| 65/66 | Q134E | +++ | |
| 67/68 | N368G | ++ | |
| 69/70 | E151D | + | |
| 71/72 | Q274K | + | |
| 73/74 | Q134D | +++ | |
| 75/76 | Q134V | ++ | |
| 77/78 | E128I | ++ | |
| 79/80 | Y339S | +++ | |
| 81/82 | N313A | ++ | |
| 83/84 | A131E | + | |
| 85/86 | N185P | ++ | |
| 87/88 | A374W | + | |
| 89/90 | R314G | ++ | |
| 91/92 | V191R | + | |
| 93/94 | E128V | ++ | |
| 95/96 | T132E | ++ | |
| 97/98 | S324R | + | |
| 99/100 | T315M | + | |
| 101/102 | T132V | + | |
| 103/104 | Q375L | + | |
| 105/106 | Q375T | ++ | |
| 107/108 | G129L | + | |
| 109/110 | T132P | ++ | |
| 111/112 | T184M | + | |
| 113/114 | V136G | + | |
| 115/116 | L186A | + | |
| 117/118 | A135S | + | |
| 119/120 | Q220L | + | |
| 121/122 | Q134P | ++ | |
| 123/124 | T132A | + | |
| 125/126 | N141M | ++ | |
| 127/128 | A135I | + | |
| 129/130 | N194D | ++ | |
| 131/132 | N185Q | ++ | |
| 133/134 | G263H | ++ | |
| 135/136 | Q274L | ++ | |
| 137/138 | D231V | ++ | |
| 139/140 | T315R | ++ | |
| 141/142 | Q375S | ++ | |
| 143/144 | A135T | ++ | |
| 145/146 | N185G | ++ | |
| 147/148 | A135R | + | |
| 149/150 | V277D | + | |
| 151/152 | E128P | ++ | |
| 153/154 | T132R | + | |
| 155/156 | P369I | + | |
| 157/158 | G264C | ++ | |
| 159/160 | T315H | + | |
| 161/162 | I251S | + | |
| 163/164 | V136I | + | |
| 165/166 | S160P | ++ | |
| 167/168 | Q375I | ++ | |
| 169/170 | N180M | + | |
| 171/172 | P369V | ++ | |
| 173/174 | I251D | ++ | |
| 175/176 | G264A | + | |
| 177/178 | K163L | ++ | |
| 179/180 | D231H | ++ | |
| 181/182 | R343S | ++ | |
| 183/184 | G264R/Q279R | ++ | |
| 185/186 | Q274A | ++ | |
| 187/188 | Q279Y | ++ | |
| 189/190 | A131P | ++ | |
| 191/192 | N232S | ++ | |
| 193/194 | Q220R | ++ | |
| 195/196 | T315Q | + | |
| 197/198 | L186T | + | |
| 199/200 | S324V | ++ | |
| 201/202 | N313S | + | |
| 203/204 | T132D | ++ | |
| 205/206 | N141R/A300V | ++ | |
| 207/208 | S324I | ++ | |
| 209/210 | A367V | ++ | |
| 211/212 | A135V | ++ | |
| 213/214 | D370L | + | |
| 215/216 | T132G | ++ | |
| 217/218 | Q267G | ++ | |
| 219/220 | A131T | + | |
| 221/222 | N266T | + | |
| 223/224 | A179K | + | |
| 225/226 | S372A | + | |
| 227/228 | S372F | ++ | |
| 229/230 | N185T | ++ | |
| 231/232 | S324D | ++ | |
| 233/234 | A135K | + | |
| 235/236 | R188A | ++ | |
| 237/238 | N141D | ++ | |
| 239/240 | A374L | + | |
| 241/242 | N185D | ++ | |
| 243/244 | T130N | + | |
| 245/246 | D370V | + | |
| 247/248 | S161R | ++ | |
| 249/250 | T315I | + | |
| 251/252 | T315L | +++ | |
| 253/254 | S318N | ++ | |
| 255/256 | R188C | ++ | |
| 257/258 | N180L | ++ | |
| 259/260 | S372Y | ++ | |
| 261/262 | A135P | ++ | |
| 263/264 | Q375E | ++ | |
| 265/266 | S324A | ++ | |
| 267/268 | G129K | ++ | |
| 269/270 | Q134M | + | |
| 271/272 | T184G | +++ | |
| 273/274 | N185A | ++ | |
| 275/276 | G129H | ++ | |
| 277/278 | R188D | + | |
| 279/280 | T130F | + | |
| 281/282 | Y265C | ++ | |
| 283/284 | N141W | | ++ |
| 285/286 | S324W | | + |
| 287/288 | D370E | | ++ |
| 289/290 | T184R | | + |
| 291/292 | Q134A | | + |
| 293/294 | S161L | | ++ |
| 295/296 | Q134T | | + |
| 297/298 | D370G | | ++ |
| 299/300 | Q375A | | ++ |
| 301/302 | E128G | | ++ |
| 303/304 | T130V | | ++ |
| 305/306 | Q134N | | ++ |
| 307/308 | N341G | | ++ |
| 309/310 | F190S | | ++ |
| 311/312 | D370P | | + |
| 313/314 | N145R | | + |
| 315/316 | Q279H | | + |
| 317/318 | Q279S | | + |
| 319/320 | S160Q | | + |
| 321/322 | D370K | | + |
| 323/324 | A126T/G192C | | + |
| 325/326 | A374E | | ++ |
| 327/328 | E128K | | ++ |
| 329/330 | S160C | | + |
| 331/332 | L186S | | ++ |
| 333/334 | N11K/Q220K | | + |
| 335/336 | Q134W | | ++ |
| 337/338 | G129V | | ++ |
| 339/340 | E128L | | ++ |
| 341/342 | E151Q | | ++ |
| 343/344 | Q375M | | ++ |
| 345/346 | Q134C | | + |
| 347/348 | A374R | | ++ |
| 349/350 | S160T | | + |
| 351/352 | Q279T | | ++ |
| 353/354 | G264F | | ++ |
| 355/356 | T132C | | ++ |
| 357/358 | G129F | | ++ |
| 359/360 | G264V | | ++ |
| 361/362 | G129I | | ++ |
| 363/364 | T184Q | | + |
| 365/366 | G192M | | + |
| 367/368 | A374S | | ++ |
| 369/370 | D370F | | ++ |
| 371/372 | Q267A | | ++ |
| 373/374 | P369W | | + |
| 375/376 | Q199L | | + |
| 377/378 | N145M | | + |
| 379/380 | N194A | | ++ |
| 381/382 | N185S | | ++ |
| 383/384 | Y265R | | + |
| 385/386 | G129S | | ++ |
| 387/388 | N185R | | + |
| 389/390 | R188W | | ++ |
| 391/392 | S161G | ++ | |
| 393/394 | D370G/Q392Y | ++ | |
| 395/396 | I99V/A278N | ++ | |
| 397/398 | Y265G/T311D | ++ | |
| 399/400 | V84M/S159G/Y265G/ | ++ | |
| | Q279K/T311D/D370G | | |
| 401/402 | T311D/R316K | ++ | |
| 403/404 | S342N/D370G | ++ | |
| 405/406 | Y265G/T311D/D370G | ++ | |
| 407/408 | G192D/T311D/R316K | ++ | |
| 409/410 | N141Q/A154D/G192D | ++ | |
| 411/412 | Y265G/T311D/R316K/ | ++ | |
| | S342N | | |
| 413/414 | Q279K/T311D/R316K | ++ | |
| 415/416 | N141Q/Y265G/Q279K/ | ++ | |
| | T311D/S342N | | |
| 417/418 | N141Q/G192D/T311D/ | ++ | |
| | R316K/D370G | | |
| 419/420 | N141Q | ++ | |
| 421/422 | N141Q/Y265G/T311D | ++ | |
| 423/424 | V198G/Q279K | ++ | |
| 425/426 | Q392Y | + | |
| 427/428 | S342N/D370G/Q392Y | ++ | |
| 429/430 | N141Q/V198G/Y265G | ++ | |
| 431/432 | Y265G/Q392Y | ++ | |
| 433/434 | Y265G | ++ | |

All activities were determined relative to the reference polypeptide of SEQ ID NO: 4. Levels of increased activity are defined as follows: “+” 0.9 to 1.2, “++” >1.2, “+++” >1.8. The reference sequence and all variants within this table are represented in the Sequence Listing as a fragment (residues 1-413) of their full length sequence, as described in Example 3

TABLE 3.2
Protease activity relative to SEQ ID NO: 4

| | | pH 4.5 | |
|---|---|---|---|
| | | pepsin | Unchallenged |
| | Amino Acid | challenge | activity |
| SEQ | Differences | improvement | improvement |
| ID NO: | (Relative to | relative to | relative to |
| (nt/aa) | SEQ ID NO: 4) | SEQ ID NO: 4 | SEQ ID NO: 4 |
| 435/436 | A135L | + | |
| 437/438 | N194L | + | + |
| 439/440 | E128T | + | + |
| 441/442 | Q134S | + | + |
| 443/444 | N313T | + | + |
| 445/446 | T184L/Q267L | + | + |
| 447/448 | N185E | + | + |
| 449/450 | S342G | ++ | + |
| 451/452 | A374Y | + | + |
| 453/454 | N141R | + | |
| 455/456 | L186Y | + | + |
| 457/458 | S312R | + | |
| 459/460 | N313Q | + | + |
| 461/462 | T315V | + | + |
| 463/464 | A374G | + | + |
| 465/466 | E128S | + | + |
| 467/468 | V136A | + | + |
| 469/470 | E128R | + | |
| 471/472 | D370Q | + | |
| 473/474 | Q267V | + | + |
| 475/476 | R188M | + | + |
| 477/478 | R188F | + | ++ |
| 479/480 | G263S | + | ++ |
| 481/482 | R188S | + | + |
| 483/484 | Y339W | + | + |
| 485/486 | A100V/I251S | + | +++ |
| 487/488 | A131V | + | + |
| 489/490 | R188T | + | + |
| 491/492 | N141L | ++ | |
| 493/494 | Q134Y | + | |
| 495/496 | Q267M | + | + |
| 497/498 | G264N | + | + |
| 499/500 | Q134G | + | + |
| 501/502 | N185L | + | + |
| 503/504 | D370S | + | |
| 505/506 | Q267W | + | + |
| 507/508 | Q279M | + | ++ |
| 509/510 | Q267R | + | + |
| 511/512 | G264T | + | + |
| 513/514 | Q279L | + | ++ |
| 515/516 | G263R | + | |
| 517/518 | V136C | + | |
| 519/520 | N145E | ++ | + |
| 521/522 | R188G | + | + |
| 523/524 | T130A | + | + |
| 525/526 | G192N | + | + |
| 527/528 | R188L | + | + |
| 529/530 | S312I | ++ | |
| 531/532 | G129E | + | |
| 533/534 | T315E | + | ++ |
| 535/536 | N145A | + | + |
| 537/538 | Q267H | + | + |
| 539/540 | S372V | + | + |
| 541/542 | T130G | + | + |
| 543/544 | Q267T | | ++ |
| 545/546 | Q274W | + | + |
| 547/548 | V136M | + | + |
| 549/550 | S372C | + | + |
| 551/552 | N194T | + | + |
| 553/554 | Q375V | + | + |
| 555/556 | A135G | + | + |
| 557/558 | Q267I | + | + |
| 559/560 | N141L/Q220R | + | + |
| 561/562 | S324E | + | + |
| 563/564 | S160L | ++ | + |
| 565/566 | N141S | ++ | |
| 567/568 | S372L | + | ++ |
| 569/570 | A135Y | + | |
| 571/572 | N141V | + | + |
| 573/574 | N141A | + | + |
| 575/576 | A131R | + | + |
| 577/578 | A135E | + | + |
| 579/580 | S324Y | + | |
| 581/582 | T311D/R316K/D370G | + | ++ |
| 583/584 | I99V | + | + |
| 585/586 | A278N | + | + |
| 587/588 | V405Q | | + |
| 589/590 | T311D/S342N/D370G | ++ | ++ |
| 591/592 | N141Q/V198G | ++ | ++ |
| 593/594 | T311D/S342N | ++ | ++ |
| 595/596 | N141Q/T311D | ++ | ++ |
| 597/598 | Q279K/T311D/R377H/Q392Y | + | + |
| 599/600 | L186Y/V198G/T311D/ | ++ | +++ |
| | S342N/D370G/Q392Y | | |
| 601/602 | N141Q/Q392Y | ++ | + |
| 603/604 | T311D/D370G/Q392Y | ++ | ++ |
| 605/606 | N141Q/T311D/Q392Y | + | ++ |
| 607/608 | T311D/D370G | ++ | ++ |
| 609/610 | T311D/R316K/Q392Y | ++ | ++ |
| 611/612 | Y265G/T311D/Q392Y | + | +++ |
| 613/614 | N141Q/G192D | ++ | ++ |
| 615/616 | T311D | ++ | ++ |
| 617/618 | N141Q/Y265G/T311D/Q392Y | ++ | ++ |
| 619/620 | G192D/T311D/D370G/Q392Y | ++ | ++ |
| 621/622 | V198G/Y265G/T311D/R316K/D370G | + | +++ |
| 623/624 | N141Q/L186Y/Y265G/T311D | ++ | +++ |
| 625/626 | N141Q/V198G/Y265G/T311D/D370G | ++ | +++ |
| 627/628 | | + | + |

All activities were determined relative to the reference polypeptide of SEQ ID NO: 4. Levels of increased activity are defined as follows: “+” 0.9 to 1.2, “++” >1.2, “+++” >2. The reference sequence and all variants within this table are represented in the Sequence Listing as a fragment (i.e., residues 1-413) of their full length sequence, as described in Example 3.

### Example 4

Screening Results of Protease Variants Derived from SEQ ID NO: 628

[0365] The engineered protease variant used in this Example and represented by SEQ ID NO: 628 has amino acid residues 426-522 of SEQ ID NO: 2 deleted while retaining the His-tag sequence (see FIG. 1). This construct was used as the backbone for the construction of protease variants in this Example. Within the Sequence Listing, for purposes of consistency in description, SEQ ID NO: 628 and variants derived therefrom are represented as a fragment (residues 1-413) of their full-length sequence of the actual variants studied. The actual variants examined include residues 414-425 of SEQ ID NO: 2 and the His-tag sequence (see FIG. 1). Mutations identified in Tables 3.1 and 3.2 were recombined on this backbone and additional mutagenesis was performed. Variants were screened using the casein activity assay at pH 7.5 after a 1 hour pre-incubation at pH 4.5 in the presence of pepsin, as described in Example 2. Analysis of the data relative to SEQ ID NO: 628 is listed in Table 4.1. Some variants from these libraries were assayed in triplicate in the casein activity assay at pH 7.5 after no prior challenge, after a 1 hour pre-incubation at pH 4.5 in the presence of Pepsin, after a one hour pre-incubation at pH 4.45 in the presence of Pepsin, and after a one hour heat challenge at 64° C., as described in Example 2. Analysis of the average data relative to SEQ ID NO: 628 are listed in Table 4.2.

TABLE 4.1
Protease activity relative to SEQ ID NO: 628

| | Amino Acid | pH 4.5 |
|---|---|---|
| SEQ | Differences | Pepsin Challenge |
| ID NO: | (Relative to | Improvement Relative |
| (nt/aa) | SEQ ID NO: 628) | to SEQ ID NO: 628 |
| 629/630 | T242E | + |
| 631/632 | S157V | ++ |
| 633/634 | D250N | + |
| 635/636 | V373F | + |
| 637/638 | Q243R | + |
| 639/640 | Y336F | + |
| 641/642 | G187A | + |
| 643/644 | G240A | + |
| 645/646 | G280K | + |
| 647/648 | E271A | + |
| 649/650 | S237G | + |
| 651/652 | E386W | ++ |
| 653/654 | D382G | ++ |
| 655/656 | G280S | + |
| 657/658 | V373Y | + |
| 659/660 | V328M | + |
| 661/662 | S157R | + |
| 663/664 | S157A | + |
| 665/666 | G42W | + |
| 667/668 | Q243E | + |
| 669/670 | D382S | + |
| 671/672 | T391L | ++ |
| 673/674 | R381N | + |
| 675/676 | Q243M | + |
| 677/678 | T275V | + |
| 679/680 | S157I | ++ |
| 681/682 | V373S | + |
| 683/684 | S157T | + |
| 685/686 | G280D | + |
| 687/688 | A249G | + |
| 689/690 | Y239L | + |
| 691/692 | A384C | + |
| 693/694 | N139M | ++ |
| 695/696 | G240L | + |
| 697/698 | Q243T | ++ |
| 699/700 | D250L | + |
| 701/702 | D250A | + |
| 703/704 | D382T | ++ |
| 705/706 | I364A | + |
| 707/708 | S346V | + |
| 709/710 | V373M | + |
| 711/712 | S389P | ++ |
| 713/714 | V373C | + |
| 715/716 | D382R | + |
| 717/718 | V373E | + |
| 719/720 | D254E | + |
| 721/722 | L246I | + |
| 723/724 | D250F | + |
| 725/726 | G280T | + |
| 727/728 | V373A | ++ |
| 729/730 | N139K | + |
| 731/732 | T345I | + |
| 733/734 | V360S | + |
| 735/736 | T275A | + |
| 737/738 | A249M | + |
| 739/740 | I364V | + |
| 741/742 | S303V | + |
| 743/744 | A300R | + |
| 745/746 | Y239M | + |
| 747/748 | M269T | + |
| 749/750 | A135G/N141Q/S372L | ++ |
| 751/752 | T311D/T315V/S372L | ++ |
| 753/754 | V136M/N141V/T311D | ++ |
| 755/756 | N141V/R188M | ++ |
| 757/758 | A135E/V136M | + |
| 759/760 | V136M/N141Q/T311D | ++ |
| 761/762 | A135E/N141V/T315V | ++ |
| 763/764 | S372V | + |
| 765/766 | A135E/N141V/S160L/Q267I/S372V | ++ |
| 767/768 | A135G/V136M/N141V/S160L/N185E/ | ++ |
| | R188M/Q2671/T311D/T315V | |
| 769/770 | A135G/V136M | ++ |
| 771/772 | S160L/N185E | + |
| 773/774 | A135E/N141V/R188M/Q279M/T311D | ++ |
| 775/776 | A135G/V136M/N141Q | ++ |
| 777/778 | A135G/V136M/N141Q/S372L | ++ |
| 779/780 | A135G/N141V/S160L/N185E/ | ++ |
| | Q267I/Q279M | |
| 781/782 | A135G/N141V/S160L/Q267I | ++ |
| 783/784 | N141Q/R188M/T311D/S372V | ++ |
| 785/786 | S160L/N185E/R188M/Q279M/T311D | ++ |
| 787/788 | V136M/N141V/Q279M | ++ |
| 789/790 | A135G/V136M/N141V/S160L/ | ++ |
| | N185E/R188L | |
| 791/792 | N141Q/S372V | ++ |
| 793/794 | A135E/V136M/N141Q/T311D | ++ |
| 795/796 | N185E/T311D/T315V/S372V | ++ |
| 797/798 | A135G/N141V/R188M | ++ |
| 799/800 | V136M/N185E | ++ |
| 801/802 | A135E/N141Q | ++ |
| 803/804 | A135E/V136M/N141Q/Q279M/ | ++ |
| | T315V/S372L | |
| 805/806 | A135G/T311D/T315V | ++ |
| 807/808 | N141V | ++ |
| 809/810 | A135G/N141V | ++ |
| 811/812 | T311D/S372L | ++ |
| 813/814 | R188M/T311D | ++ |
| 815/816 | A135E/N141V/R188L/S372L | ++ |
| 817/818 | N141V/S160L/Q279M | ++ |
| 819/820 | N313Q/Q392Y | ++ |
| 821/822 | S342G/Q392Y | ++ |
| 823/824 | Q279L/Q392Y | + |
| 825/826 | E128T | + |
| 827/828 | V198G/S342G | ++ |
| 829/830 | N313Q | + |
| 831/832 | E128T/S312I | ++ |
| 833/834 | K50R | + |
| 835/836 | N145E/G263S | + |
| 837/838 | N313Q/S342G | + |
| 839/840 | Q279L/S312I | + |
| 841/842 | S312I/Q392Y | ++ |
| 843/844 | Q279K/S342G | + |
| 845/846 | Q279K/Q392Y | + |
| 847/848 | E128T/S342G | + |
| 849/850 | S342G | + |
| 851/852 | G263S | + |

All activities were determined relative to the reference polypeptide of SEQ ID NO: 628. Levels of increased activity are defined as follows: “+” 1 to 1.2, “++” >1.2. The reference sequence and all variants within this table are represented in the Sequence Listing as a fragment (residue 1-413) of their full length sequence, as described in Example 4

TABLE 4.2
Protease activity relative to SEQ ID NO: 628

| | | pH 4.5 and | pH 4.45 and | | |
|---|---|---|---|---|---|
| | | Pepsin | Pepsin | Unchallenged | Heat |
| | Amino Acid | Challenge | Challenge | Activity | Challenge |
| SEQ ID | Differences | Improvement | Improvement | Improvement | Improvement |
| NO: | (Relative to | Relative to | Relative to | Relative to | Relative to |
| (nt/aa) | SEQ ID NO: 628) | SEQ ID NO: 628 | SEQ ID NO: 628 | SEQ ID NO: 628 | SEQ ID NO: 628 |
| 853/854 | N139C | ++ | + | + | ++ |
| 855/856 | T345R | ++ | ++ | + | + |
| 857/858 | Q243L | + | + | + | ++ |
| 859/860 | H143A | + | ++ | | |
| 861/862 | A249S | + | + | + | ++ |
| 863/864 | G262S | ++ | ++ | + | ++ |
| 865/866 | N139R | + | + | + | + |
| 867/868 | M269Q | ++ | ++ | + | +++ |
| 869/870 | V328L | ++ | ++ | + | +++ |
| 871/872 | S157G | + | + | + | + |
| 873/874 | T156V | + | + | + | + |
| 875/876 | T242S | + | + | + | |
| 877/878 | N139L | ++ | ++ | + | ++ |
| 879/880 | G262A | ++ | ++ | + | ++ |
| 881/882 | T169S | ++ | ++ | + | + |
| 883/884 | S346T | ++ | ++ | + | ++ |
| 885/886 | H143N/S237A | ++ | ++ | + | ++ |
| 887/888 | V136M/S160L/N185E/ | ++ | ++ | + | +++ |
| | Q267I/T311D/S372L | | | | |
| 889/890 | A135E/S160L/T311D/ | ++ | +++ | + | ++++ |
| | S372L | | | | |
| 891/892 | A135G/N141V/T311D/ | ++ | ++ | + | ++++ |
| | T315V | | | | |
| 893/894 | N141V/T311D/T315V | ++ | ++ | ++ | ++++ |
| 895/896 | V136M/N141V/S160L/ | ++ | ++ | + | ++++ |
| | N185E/R188M/T311D/ | | | | |
| | T315V/S372V | | | | |
| 897/898 | A135G/N141V/T311D/ | ++ | +++ | + | ++++ |
| | T315V/S372L | | | | |
| 899/900 | A135G/N141Q/S160L/ | ++ | ++ | + | ++++ |
| | N185E/T311D/T315V | | | | |
| 901/902 | A135G/N141V/Q267I/ | ++ | ++ | + | ++++ |
| | T311D/T315V/S372V | | | | |
| 903/904 | A135G/V136M/N141V/ | ++ | ++ | + | ++++ |
| | S160L/T311D/T315V | | | | |
| 905/906 | A135G/V136M/N141V/ | ++ | ++ | + | +++ |
| | Q279M | | | | |
| 907/908 | A135G/N141Q/Q267I/ | ++ | ++ | + | ++++ |
| | Q279M/T311D/T315V | | | | |
| 909/910 | A135E/N141V/T311D/ | ++ | +++ | + | ++++ |
| | T315V/S372V | | | | |
| 911/912 | A135E/N141Q/S160L | ++ | ++ | + | +++ |
| 913/914 | A135G/N141Q/T311D/ | ++ | ++ | + | ++++ |
| | T315V | | | | |
| 915/916 | A135G/N141V/S160L/ | ++ | +++ | + | ++++ |
| | T311D/T315V/S372V | | | | |
| 917/918 | A135G/N141V/S160L/ | ++ | +++ | + | ++++ |
| | T311D/T315V | | | | |
| 919/920 | A135G/N141Q/Q267I/ | ++ | ++ | + | ++++ |
| | T311D/T315V/S372L | | | | |
| 921/922 | A135G/V136M/N141V/ | ++ | +++ | + | ++++ |
| | R188M/T311D | | | | |
| 923/924 | N141V/S160L/T311D | ++ | +++ | ++ | ++++ |
| 925/926 | A135E/N141V/S160L/ | ++ | ++ | + | ++++ |
| | Q279M/T311D/T315V/ | | | | |
| | S372L | | | | |
| 927/928 | N141V/S160L/N185E/ | ++ | ++ | + | ++++ |
| | Q279M/T311D/S372V | | | | |
| 929/930 | A135E/N141V/T311D/ | ++ | +++ | + | ++++ |
| | T315V | | | | |
| 931/932 | A135G/V136M/N141V/ | ++ | ++ | + | ++ |
| | S160L/T315V/S372V | | | | |
| 933/934 | A135E/N141V/S160L | ++ | ++ | + | +++ |
| 935/936 | A135E/V136M/S160L/ | ++ | ++ | ++ | ++++ |
| | Q279M/T311D/S372V | | | | |
| 937/938 | E128T/Q279K/S312I/ | ++ | ++ | + | +++ |
| | S342G | | | | |
| 939/940 | E128T/V198G/S312I/ | ++ | ++ | + | +++ |
| | S342G | | | | |
| 941/942 | G263S/S342G | + | ++ | + | |
| 943/944 | N145E/G263S/Q279L/ | ++ | ++ | + | ++ |
| | S312I/S342G/Q392Y | | | | |
| 945/946 | E128T/N145E/V198G/ | ++ | ++ | + | + |
| | S312I/N313Q/Q392Y | | | | |

All activities were determined relative to the reference polypeptide of SEQ ID NO: 628. Levels of increased activity are defined as follows: “+” 0.9 to 1.2, “++” >1.2, “+++” >2, “++++” >3. The reference sequence and all variants within this table are represented in the Sequence Listing as a fragment (residues 1-413) of their full length sequence, as described in Example 4

### Example 5

Screening Results of Protease Variants Derived from SEQ ID NO: 948

[0366] The engineered protease variant SEQ ID NO: 916 was truncated at the C-termini by 24 residues, including the removal of the 6×His tag, resulting in SEQ ID NO: 948. As such, SEQ ID NO: 948 has a carboxy terminus at amino acid residue 413. SEQ ID NO: 948 was used as the backbone for the construction of additional protease variants. Previously identified mutations were recombined on this backbone and additional mutagenesis was performed. Variants were screened using the casein activity assay at pH 7.5 after a 1 hour pre-incubation at pH 3.9 in the presence of pepsin as described in Example 2. Analysis of the data relative to SEQ ID NO: 948 is listed in Table 5.1. Some variants generated from these libraries were assayed in triplicate in the casein activity assay at pH 7.5 after no prior challenge, after a 1 hour pre-incubation at pH 3.8, 3.9, or 4.0 in the presence of pepsin, and after a 1 hour heat challenge at 71° C., as described in Example 2. Additionally, additional variants were assayed in triplicate in the casein activity assay at pH 6.5 unchallenged, as described in Example 2. Analysis of the average data relative to SEQ ID NO: 948 are listed in Table 5.2.

TABLE 5.1
Protease activity relative to SEQ ID NO: 948

| | | pH 3.9 pepsin |
|---|---|---|
| | Amino Acid | challenge |
| SEQ ID | Differences | improvement |
| NO: | (Relative to | relative to |
| (nt/aa) | SEQ ID NO: 948) | SEQ ID NO: 948 |
| 949/950 | S411V | ++ |
| 951/952 | S411R | ++ |
| 953/954 | A402G | ++ |
| 955/956 | A285S | + |
| 957/958 | I245V | ++ |
| 959/960 | N266H | ++ |
| 961/962 | P355A | ++ |
| 963/964 | M258W | ++ |
| 965/966 | A222G | + |
| 967/968 | Q140L | ++ |
| 969/970 | S268T | + |
| 971/972 | S411L | ++ |
| 973/974 | I225V | ++ |
| 975/976 | I245L | ++ |
| 977/978 | V283M | + |
| 979/980 | A406W | + |
| 981/982 | G410C | + |
| 983/984 | A406C | ++ |
| 985/986 | H143A/N145E/Q243L/S312I | +++ |
| 987/988 | N139L/H143A/N145E/S157G/S312I | +++ |
| 989/990 | N139C/S157G/T345R | +++ |
| 991/992 | N139C/M269Q | ++ |
| 993/994 | T156V/S157G/S342G/S346T | +++ |
| 995/996 | N139L/H143A | +++ |
| 997/998 | M269Q | ++ |
| 999/1000 | N139L/Q243L/V328L | +++ |
| 1001/1002 | M269Q/V328L | ++ |
| 1003/1004 | H143A/N145E/T169S | +++ |
| 1005/1006 | V328L | +++ |
| 1007/1008 | H143A/N145E/G262S | +++ |
| 1009/1010 | N145E/G262S/S312I/V328L | +++ |
| 1011/1012 | N139L/T156V/S157G | +++ |
| 1013/1014 | N139C/N145E/S312I | +++ |
| 1015/1016 | S312I | ++ |
| 1017/1018 | N139C | +++ |
| 1019/1020 | N139C/S312I | +++ |
| 1021/1022 | N139C/T156V | +++ |
| 1023/1024 | N139C/H143A/N145E/Q243L | +++ |
| 1025/1026 | N145E/S157G | +++ |
| 1027/1028 | N145E/S346T | +++ |
| 1029/1030 | N145E/G262A/S312I/V328L/ | +++ |
| | T345R/S346T | |
| 1031/1032 | N145E/G262A | ++ |
| 1033/1034 | S312I/S342G | ++ |
| 1035/1036 | H143A/Q243L | +++ |
| 1037/1038 | N139C/T345R | ++ |
| 1039/1040 | S342G | ++ |
| 1041/1042 | H143A/N145E/G262S/S342G | +++ |
| 1043/1044 | N139L/H143A/T169S | +++ |
| 1045/1046 | N139C/H143A/N145E/S312I | +++ |
| 1047/1048 | T169S | ++ |
| 1049/1050 | N139L/N145E/G262A/S312I/ | ++ |
| | V328L/S342G/T345R/S346T | |
| 1051/1052 | N139C/V328L | +++ |
| 1053/1054 | N139L/Q243L | ++ |
| 1055/1056 | N139L/H143A/V328L | +++ |
| 1057/1058 | N139L | ++ |
| 1059/1060 | N139C/H143A/Q243L | +++ |
| 1061/1062 | N139C/N145E | +++ |
| 1063/1064 | N145E/S312I | ++ |
| 1065/1066 | N145E/T169S | ++ |
| 1067/1068 | N139C/H143A/S157G/S312I | +++ |
| 1069/1070 | V84M/N139C/H143A | ++ |
| 1071/1072 | N145E/M269Q | ++ |
| 1073/1074 | H143A/N145E/S157G/M269Q/ | +++ |
| | S312I/V328L | |
| 1075/1076 | H143A/N145E/M269Q | +++ |
| 1077/1078 | S157G | ++ |
| 1079/1080 | N139L/H143A/S312I | +++ |

All activities were determined relative to the reference polypeptide of SEQ ID NO: 948. Levels of increased activity are defined as follows: “+” 1.0 to 1.2, “++” >1.2, “+++” >2

TABLE 5.2
Protease activity relative to SEQ ID NO: 948

| | | pH 3.9 and | pH 3.8 and | pH 4.0 and | pH 7.5 | pH 6.5 | |
|---|---|---|---|---|---|---|---|
| | | Pepsin | Pepsin | Pepsin | Unchallenged | Unchallenged | Heat |
| | | Challenge | Challenge | Challenge | Activity | Activity | Challenge |
| | | Improvement | Improvement | Improvement | Improvement | Improvement | Improvement |
| SEQ | | Relative to | Relative to | Relative to | Relative to | Relative to | Relative to |
| ID NO: | Amino Acid Differences | SEQ ID | SEQ ID | SEQ ID | SEQ ID | SEQ ID | SEQ ID |
| (nt/aa) | (Relative to SEQ ID NO: 948) | NO: 948 | NO: 948 | NO: 948 | NO: 948 | NO: 948 | NO: 948 |
| 1081/1082 | I256L | + | | | + | + | + |
| 1083/1084 | S411T | ++ | | + | + | + | + |
| 1085/1086 | V273F | + | | | | | |
| 1087/1088 | G409E | | | + | + | | + |
| 1089/1090 | S268G | + | | + | + | | + |
| 1091/1092 | D172Q | | | | + | + | |
| 1093/1094 | G409R | ++ | | + | + | + | + |
| 1095/1096 | H401L | + | | + | + | + | |
| 1097/1098 | T281C | + | | + | + | + | + |
| 1099/1100 | G410W | | | | + | | + |
| 1101/1102 | A253V | + | | + | + | + | + |
| 1103/1104 | A406M | | | + | + | + | + |
| 1105/1106 | V273T | ++ | | ++ | + | + | ++ |
| 1107/1108 | A406R | | | + | + | | + |
| 1109/1110 | I256M | + | | ++ | + | + | ++ |
| 1111/1112 | G410I | + | | ++ | + | + | + |
| 1113/1114 | V273M | + | | + | | | |
| 1115/1116 | V273L | ++ | | ++ | + | + | ++ |
| 1117/1118 | H143A/N145E/Q243L/V328L | +++ | ++++ | | + | + | + |
| 1119/1120 | N145E | ++ | +++ | | + | + | ++ |
| 1121/1122 | N139C/H143A/N145E/ | +++ | ++++ | | + | + | ++ |
| | V328L/S342G/T345R | | | | | | |
| 1123/1124 | N139L/N145E | ++ | +++ | | | | + |
| 1125/1126 | H143A/V328L/S342G/T345R | +++ | ++++ | | + | ++ | ++ |
| 1127/1128 | N145E/S342G/T345R | +++ | ++++ | | ++ | ++ | ++ |
| 1129/1130 | H143A | ++ | ++++ | | | | |
| 1131/1132 | N139C/H143A | ++ | ++++ | | | | + |
| 1133/1134 | N139C/N145E/V328L/ | +++ | ++++ | | + | ++ | ++ |
| | S342G/T345R | | | | | | |
| 1135/1136 | H143A/N145E/T169S/S312I/ | +++ | ++++ | | + | ++ | ++ |
| | V328L/T345R/S346T | | | | | | |
| 1137/1138 | H143A/Q243L/V328L/ | +++ | ++++ | | + | + | ++ |
| | S342G/T345R/S346T | | | | | | |
| 1139/1140 | N139C/H143A/S157G/ | +++ | ++++ | | + | + | ++ |
| | T169S/V328L/S346T | | | | | | |
| 1141/1142 | H143A/N145E/T156V/ | ++ | ++++ | | + | | + |
| | S312I/V328L | | | | | | |
| 1143/1144 | N139C/N145E/S157G/ | +++ | ++++ | | + | + | ++ |
| | S312I/V328L | | | | | | |
| 1145/1146 | H143A/V328L/S342G/ | +++ | ++++ | | + | ++ | ++ |
| | T345R/S346T | | | | | | |
| 1147/1148 | N139C/H143A/V328L | ++ | ++++ | | | | ++ |
| 1149/1150 | H143A/N145E | ++ | ++++ | | + | + | |
| 1151/1152 | H143A/N145E/S312I/ | +++ | ++++ | | + | + | |
| | S342G/T345R | | | | | | |
| 1153/1154 | H143A/N145E/V328L | +++ | ++++ | | + | | + |

All activities were determined relative to the reference polypeptide of SEQ ID NO: 948. Levels of increased activity are defined as follows:
“+” 0.9 to 1.2,
“++” > 1.2,
“+++” > 2,
“++++” > 3.5

### Example 6

Screening Results of Protease Variants Derived from SEQ ID NO: 1126

[0367] The engineered protease variant of SEQ ID NO: 1126 was selected as the backbone for the construction of additional protease variants. Previously identified mutations were recombined on this backbone and additional mutagenesis was performed. Variants were screened using the casein activity assay at pH 6.5 after a 1 hour pre-incubation at pH 3.35 in the presence of pepsin, as described in Example 2. Analysis of the data relative to SEQ ID NO: 1126 is listed in Table 6.1.

TABLE 6.1
Protease activity relative to SEQ ID NO: 1126

| | | pH 3.35 and |
|---|---|---|
| | Amino Acid | pepsin challenge |
| SEQ ID | Differences | improvement |
| NO: | (Relative to | relative to |
| (nt/aa) | SEQ ID NO: 1126) | SEQ ID NO: 1126 |
| 1155/1156 | Q279Y | + |
| 1157/1158 | D250T | ++ |
| 1159/1160 | A154C | + |
| 1161/1162 | S214Y | + |
| 1163/1164 | A249S | + |
| 1165/1166 | T275A | + |
| 1167/1168 | H137A | +++ |
| 1169/1170 | S161D | + |
| 1171/1172 | N180H | + |
| 1173/1174 | N174L | ++ |
| 1175/1176 | N139K | ++ |
| 1177/1178 | D254C | ++ |
| 1179/1180 | N145E | ++ |
| 1181/1182 | A278V | + |
| 1183/1184 | V136M | ++ |
| 1185/1186 | A154L/G413D | ++ |
| 1187/1188 | S294V | + |
| 1189/1190 | A154R | + |
| 1191/1192 | S237A | + |
| 1193/1194 | Q274G | + |
| 1195/1196 | H137N | +++ |
| 1197/1198 | G264P | + |
| 1199/1200 | Q274T | ++ |
| 1201/1202 | A278N | + |
| 1203/1204 | S214A | + |
| 1205/1206 | N185G | + |
| 1207/1208 | S214V | ++ |
| 1209/1210 | Q279T | + |
| 1211/1212 | V277G | + |
| 1213/1214 | G264I | + |
| 1215/1216 | S293A | ++ |
| 1217/1218 | S233L | + |
| 1219/1220 | A278Y | ++ |
| 1221/1222 | H173F | ++ |
| 1223/1224 | Q274L | + |
| 1225/1226 | S312C | +++ |
| 1227/1228 | Q279L | + |
| 1229/1230 | S302G | ++ |
| 1231/1232 | L238Q | + |
| 1233/1234 | S294W | ++ |
| 1235/1236 | G135A | ++ |
| 1237/1238 | S221E | + |
| 1239/1240 | D290S | + |
| 1241/1242 | A278S | ++ |
| 1243/1244 | G263Q | ++ |
| 1245/1246 | G263H | + |
| 1247/1248 | A278L | ++ |
| 1249/1250 | G263E | ++ |
| 1251/1252 | A154L | ++ |
| 1253/1254 | N139M | ++ |
| 1255/1256 | H137S | ++ |
| 1257/1258 | S233G | + |
| 1259/1260 | N139F | ++ |
| 1261/1262 | Q267I | + |
| 1263/1264 | S221L | + |
| 1265/1266 | H173S | + |
| 1267/1268 | S302P | + |
| 1269/1270 | S221V | + |
| 1271/1272 | Y239M | + |
| 1273/1274 | D290G | + |
| 1275/1276 | K163H | + |
| 1277/1278 | A292V | + |
| 1279/1280 | L246V | + |
| 1281/1282 | S214N | + |
| 1283/1284 | Q243S | + |
| 1285/1286 | S233I | ++ |
| 1287/1288 | S235Q | ++ |
| 1289/1290 | N145D | ++ |
| 1291/1292 | Q274V | ++ |
| 1293/1294 | Q279M | ++ |
| 1295/1296 | N185S | + |
| 1297/1298 | Q279K | ++ |
| 1299/1300 | N145W | +++ |
| 1301/1302 | D290E | + |
| 1303/1304 | S214P | ++ |
| 1305/1306 | T156V | ++ |
| 1307/1308 | T156C | ++ |
| 1309/1310 | T223S | + |
| 1311/1312 | A278V/G413D | ++ |
| 1313/1314 | D250C | + |
| 1315/1316 | Q267S | ++ |
| 1317/1318 | Y297F | + |
| 1319/1320 | S221Q | ++ |
| 1321/1322 | N194D | + |
| 1323/1324 | I251T | + |
| 1325/1326 | A253V/S411T | ++ |
| 1327/1328 | N145P/S157R/A253I/S268G/V273T/ | + |
| | T281V/S312Q/S346T/S411T | |
| 1329/1330 | N139C/S346A | ++ |
| 1331/1332 | A253V | + |
| 1333/1334 | S346T/S411T | ++ |
| 1335/1336 | A253V/S346T | ++ |
| 1337/1338 | N139C/S346T | ++ |
| 1339/1340 | S312Q/S346T | ++ |
| 1341/1342 | V273T/S312Q | ++ |
| 1343/1344 | A253I/T281V | ++ |
| 1345/1346 | S157R/A253V/V273T/S312Q/S346T/S411T | +++ |
| 1347/1348 | N139C/S157K/A253V/S268G/ | ++ |
| | V273F/T281V/S312Q/S346A | |
| 1349/1350 | A253V/V273T/S411T | ++ |
| 1351/1352 | N139C/A253I/S268F/V273T/T281V | +++ |
| 1353/1354 | N139C/S157R/S411T | +++ |
| 1355/1356 | S157G | ++ |
| 1357/1358 | V273T | ++ |
| 1359/1360 | N139C/A253V/S268G/V273F/ | +++ |
| | T281V/S312Q/S411T | |
| 1361/1362 | S157G/A253V/S411T | +++ |
| 1363/1364 | N139C/N145E/A253V/S346T | +++ |
| 1365/1366 | N139C/S157K/A253V/V273T/S312Q | +++ |
| 1367/1368 | N139C/S157G/S268G/V273T/S312Q/S346T | +++ |
| 1369/1370 | S157G/V273T/S312Q/S346T | +++ |
| 1371/1372 | N139C/S411T | +++ |
| 1373/1374 | N139C/A253V/S268G/V273F/ | +++ |
| | T281C/S312I/S346T/S411T | |
| 1375/1376 | S157K/V273F/S346T/S411T | +++ |
| 1377/1378 | N139C/N145E/S157G/V162I/ | ++ |
| | A253V/V273F/T281V/S312Q | |
| 1379/1380 | N139C/A253V/V273T/T281C/S312Q | +++ |
| 1381/1382 | S157G/A253V/S268F/V273F/T281V/S312Q | +++ |
| 1383/1384 | N139C/A253I/S268F | ++ |
| 1385/1386 | N139C/S157R/S312Q | ++ |
| 1387/1388 | A253V/V273T/T281C/S346T | +++ |
| 1389/1390 | S157K/A253V/S312I/S346T/S411T | +++ |
| 1391/1392 | S157R/V273T/S312Q/S346T/S411T | +++ |
| 1393/1394 | N139C/N145E/S157K/A253V/ | +++ |
| | S268G/T281C/S312Q | |
| 1395/1396 | N139C/V273T/S312Q/S346T | +++ |
| 1397/1398 | S157K/A253V/S268F/V273T/S312I/S346T | ++ |
| 1399/1400 | N139C/S268G/S346T | ++ |
| 1401/1402 | S157K | ++ |
| 1403/1404 | S268G/V273F/S312Q/S346T | +++ |
| 1405/1406 | N139C/S157K/A253V/S268F/V273F/S312Q | +++ |
| 1407/1408 | S157K/V273T/S312Q/S346T | +++ |
| 1409/1410 | N139C/S157G/A253V | +++ |
| 1411/1412 | N139C | ++ |
| 1413/1414 | N139C/A253V/T281V | +++ |
| 1415/1416 | N139C/S157G/A253V/S268G/V273T | +++ |
| 1417/1418 | A253V/S312Q/S411T | ++ |
| 1419/1420 | N139C/S268G/V273T | +++ |
| 1421/1422 | A253I | + |

All activities were determined relative to the reference polypeptide of SEQ ID NO: 1126. Levels of increased activity are defined as follows: “+” 0.9 to 1.2, “++” >1.2, “+++” >1.8

### Example 7

Screening Results of Protease Variants Derived from SEQ ID NO: 1368

[0368] The engineered protease variant of SEQ ID NO: 1368 was used as the backbone for the construction of additional protease variants. Previously identified mutations were recombined and additional mutagenesis was performed. Variants were screened using the casein activity assay at pH 6.5 after a 1 hour pre-incubation at pH 3.2 in the presence of pepsin, as described in Example 2. Select variants were additionally screened using the casein activity assay at pH 6.5 after a 1 hour pre-incubation at pH 3.14 in the presence of pepsin, as described in Example 2. Other select variants were additionally screened using the casein activity assay at pH 6.5 with no prior challenge, as described in Example 2. Analysis of the data relative to SEQ ID NO: 1368 is listed in Table 7.1.

TABLE 7.1
Protease activity relative to SEQ ID NO: 1368

| | | pH 3.2 and | pH 3.14 and | Unchallenged |
|---|---|---|---|---|
| | Amino Acid | pepsin challenge | pepsin challenge | activity |
| SEQ ID | Differences | improvement | improvement | improvement |
| NO: | (Relative to | relative to | relative to | relative to |
| (nt/aa) | SEQ ID NO: 1368) | SEQ ID NO: 1368 | SEQ ID NO: 1368 | SEQ ID NO: 1368 |
| 1423/1424 | D31G | + | | |
| 1425/1426 | S318R | + | | |
| 1427/1428 | S296R | + | | |
| 1429/1430 | S296M | + | | |
| 1431/1432 | D252P | + | | |
| 1433/1434 | S303A | + | | |
| 1435/1436 | A253C | + | | |
| 1437/1438 | G413C | + | | |
| 1439/1440 | E386P | + | | |
| 1441/1442 | G413A | + | | |
| 1443/1444 | Q312R | ++ | | |
| 1445/1446 | S235R | + | | |
| 1447/1448 | G412P | + | | |
| 1449/1450 | G342A | + | | |
| 1451/1452 | G413S | + | | |
| 1453/1454 | S302P | + | | |
| 1455/1456 | I371L | + | | |
| 1457/1458 | V405L | + | | |
| 1459/1460 | Q312A | + | | |
| 1461/1462 | S389P | + | | |
| 1463/1464 | S318P | + | | |
| 1465/1466 | T391S | + | | |
| 1467/1468 | G412T | + | | |
| 1469/1470 | A358S | + | | |
| 1471/1472 | S389C | + | | |
| 1473/1474 | S235V | ++ | | |
| 1475/1476 | T391L | + | | |
| 1477/1478 | C139N/T273V/D311T/L328V/ | | | ++ |
| | V372S | | | |
| 1479/1480 | D311T | | | + |
| 1481/1482 | Q312S | + | | + |
| 1483/1484 | V372S | + | | |
| 1485/1486 | C139N/A143H/G157S/L160S/ | | | ++ |
| | G268S/T273V/D311T/V315T | | | |
| 1487/1488 | A143H | | | + |
| 1489/1490 | C139N/A143H | | | ++ |
| 1491/1492 | C139N/L160S/Q312S/V372S | | | ++ |
| 1493/1494 | A143H/T273V/L328V | | | ++ |
| 1495/1496 | T346S | + | | + |
| 1497/1498 | G135A/C139N/L160S/G268S/ | | | ++ |
| | Q312S/G342S/T346S | | | |
| 1499/1500 | C139N/V141N/T273V | | | ++ |
| 1501/1502 | G135A/V141N/A143H/G268S/ | | | ++ |
| | T273V/Q312S/V372S | | | |
| 1503/1504 | C139N/V141N/A143H/D311T | | | ++ |
| 1505/1506 | C139N/G157S/G268S/L328V/ | | | ++ |
| | T346S/V372S | | | |
| 1507/1508 | T53A/C139N/V141N/A143H/ | | | ++ |
| | T273V/V372S | | | |
| 1509/1510 | C139N | | | ++ |
| 1511/1512 | C139N/V141N/A143H/T273V/ | | | ++ |
| | Q312S | | | |
| 1513/1514 | C139L | + | + | |
| 1515/1516 | H137A/C139N/S221Q/S233L/ | ++ | ++ | |
| | G413D | | | |
| 1517/1518 | S233L | + | + | |
| 1519/1520 | S221Q/Q279K | + | ++ | |
| 1521/1522 | H137N/C139N/S233L/Q279M | ++ | +++ | |
| 1523/1524 | S221Q | + | ++ | |
| 1525/1526 | C139L/S214V | + | ++ | |
| 1527/1528 | H137N/C139N/T156V | ++ | +++ | |
| 1529/1530 | C139L/S214V/S221Q | ++ | +++ | |
| 1531/1532 | S214V/S233L | + | ++ | |
| 1533/1534 | H137A/C139L/S221Q/S233L/ | + | +++ | |
| | Q279K | | | |
| 1535/1536 | H137A/C139L/S221Q | ++ | +++ | |
| 1537/1538 | H137N/C139L | ++ | +++ | |
| 1539/1540 | H137N/C139L/Q279K | ++ | +++ | |
| 1541/1542 | H137A/C139N | + | ++ | |
| 1543/1544 | H137N | ++ | +++ | |
| 1545/1546 | H137N/C139L/S221Q | ++ | +++ | |
| 1547/1548 | H137N/C139L/S214P/Q279M | ++ | +++ | |
| 1549/1550 | N266Y | + | + | |
| 1551/1552 | C139L/S221Q | + | ++ | |
| 1553/1554 | H137N/S221Q | ++ | +++ | |
| 1555/1556 | H137N/C139N | ++ | +++ | |
| 1557/1558 | H137N/T156V/S214V/Q312C | ++ | ++ | |
| 1559/1560 | H137N/S221Q/S233L | ++ | +++ | |
| 1561/1562 | H137N/C139N/T156V/S221Q | ++ | +++ | |
| 1563/1564 | H137A/C139L/S214V | ++ | +++ | |
| 1565/1566 | G413D | + | + | |
| 1567/1568 | Q279K | + | + | |
| 1569/1570 | Q279M | + | + | |
| 1571/1572 | H137A/C139L/S233L | ++ | ++ | |
| 1573/1574 | H137N/C139N/S214V/S233I | ++ | +++ | |
| 1575/1576 | S221Q/G413D | ++ | + | |
| 1577/1578 | H137N/S214V/S233L | ++ | +++ | |
| 1579/1580 | H137A/C139L/S214P | ++ | +++ | |
| 1581/1582 | H137N/C139N/S221Q/S233L/ | ++ | +++ | |
| | Q279M | | | |
| 1583/1584 | H137N/T156V | ++ | +++ | |
| 1585/1586 | H137N/C139L/S221Q/S233I | + | +++ | |
| 1587/1588 | S214V/S221Q | ++ | ++ | |
| 1589/1590 | H137N/S221Q/G413D | ++ | +++ | |
| 1591/1592 | H137A/C139L/S221Q/S233L/ | ++ | +++ | |
| | Q279M | | | |
| 1593/1594 | S214V | + | ++ | |
| 1595/1596 | H137A/C139L | ++ | +++ | |
| 1597/1598 | H137N/S233L | ++ | +++ | |
| 1599/1600 | H137A | + | +++ | |
| 1601/1602 | H137N/G413D | ++ | +++ | |
| 1603/1604 | H137N/S221Q/Q279K | ++ | +++ | |
| 1605/1606 | H137N/C139N/T156V/S214V/ | + | +++ | |
| | S233L/G413D | | | |
| 1607/1608 | H137N/C139L/T156V/S214V | + | +++ | |

All activities were determined relative to the reference polypeptide of SEQ ID NO: 1368. Levels of increased activity are defined as follows: “+” 0.9 to 1.2, “++” >1.2, “+++” >1.8

### Example 8

Screening Results of Protease Variants Derived from SEQ ID NO: 1548

[0369] The engineered protease variant of SEQ ID NO: 1548 was used as the backbone for the construction of additional protease variants. Previously identified mutations were recombined on this backbone. Variants were screened using the casein activity assay at pH 6.5 with no prior challenge and after a 1 hour pre-incubation at pH 2.8 in the presence of pepsin, as described in Example 2. Analysis of the data relative to SEQ ID NO: 1548 is listed in Table 8.1.

TABLE 8.1
Protease activity relative to SEQ ID NO: 1548

| | | Unchallenged | pH 2.8 and |
|---|---|---|---|
| | Amino Acid | activity | pepsin challenge |
| SEQ ID | Differences | improvement | improvement |
| NO: | (Relative to | relative to | relative to |
| (nt/aa) | SEQ ID NO: 1548) | SEQ ID NO: 1548 | SEQ ID NO: 1548 |
| 1609/1610 | N145E/T273L/V372S | ++ | ++ |
| 1611/1612 | N145E/1256M/T273L | ++ | + |
| 1613/1614 | S221Q/Q243L/T273L/L328V/V372S | ++ | ++ |
| 1615/1616 | V372S | + | + |
| 1617/1618 | N145E/S221Q/M279L/V372S/A406R | + | ++ |
| 1619/1620 | T273L/L328V | | ++ |
| 1621/1622 | N145E/T169S/T273L/T346S/A406R | ++ | |
| 1623/1624 | I256M/T273L | + | + |
| 1625/1626 | N145E/S221Q/T273L/L328V/T346S/ | + | ++ |
| | A406R | | |
| 1627/1628 | Q243L/T273L | | + |
| 1629/1630 | N145E/P214V/I256M/T273L/M279L/ | + | + |
| | L328V/V372S | | |
| 1631/1632 | T169S/S221Q/L328V/V372S/A406R | ++ | |
| 1633/1634 | V372S/A406R | ++ | + |
| 1635/1636 | T169S/L328V/V372S/A406R | ++ | |
| 1637/1638 | S221Q/V372S | ++ | + |
| 1639/1640 | N145E/S221Q/T273L/L328V/V372S | + | ++ |
| 1641/1642 | P214V/Q243L/T273L/L328V | + | + |
| 1643/1644 | N145E/S221Q | + | + |
| 1645/1646 | P214V/I256M/T273L/T346S/V372S | + | ++ |
| 1647/1648 | S221Q/A406R | + | ++ |
| 1649/1650 | T169S/V372S | ++ | |
| 1651/1652 | N145E/P214V/S221Q/T273L | | ++ |
| 1653/1654 | N145E/S221Q/T346S/V372S | + | ++ |
| 1655/1656 | Q243L/T273L/L328V/V372S/A406R | ++ | ++ |
| 1657/1658 | N145E/T169S/T273L/L328V/T346S | ++ | |
| 1659/1660 | L328V | + | + |
| 1661/1662 | T169S/T273L/V372S | ++ | |
| 1663/1664 | N145E/S221Q/L328V | ++ | ++ |
| 1665/1666 | T169S/P214V/T273L | ++ | |
| 1667/1668 | S221Q/T273L/L328V | + | ++ |
| 1669/1670 | S221Q | ++ | ++ |
| 1671/1672 | N145E/L328V | + | ++ |
| 1673/1674 | P214N/T346S | + | |
| 1675/1676 | Q312R | + | ++ |
| 1677/1678 | Y212S | + | |
| 1679/1680 | M279K | + | + |
| 1681/1682 | Y212S/Q312R | ++ | |
| 1683/1684 | N145E | + | + |
| 1685/1686 | A179S/T346S | + | |
| 1687/1688 | P214N | ++ | |
| 1689/1690 | T346S | + | + |
| 1691/1692 | V315R/V372Y | | + |
| 1693/1694 | V372Y | + | |
| 1695/1696 | Q375A | + | + |
| 1697/1698 | G264F | + | |
| 1699/1700 | A179S | + | |
| 1701/1702 | N185T | + | + |
| 1703/1704 | Q220R/V372Y | + | |
| 1705/1706 | S324D | + | |
| 1707/1708 | N145E/S221Q/T273L/L328V/V372S | + | + |
| 1709/1710 | N145E/S221Q/T273L/L328V/V372S | + | + |

All activities were determined relative to the reference polypeptide of SEQ ID NO: 1548. Levels of increased activity are defined as follows: “+” 0.9 to 1.2, “++” >1.2

[0370] SEQ ID NO: 1639/1640 was codon optimized for improved expression in E. coli, resulting in variations in the polynucleotide sequence and represented by SEQ ID NO: 1707 and SEQ ID NO: 1709.

### Example 9

Screening Results of Protease Variants Derived from SEQ ID NO: 4

[0371] SEQ ID NO: 4 was utilized as the backbone for the construction of novel variants. Variants were generated through saturation mutagenesis and by introducing truncations at the C terminus. Select variants were screened in triplicate using the casein activity assay at pH=7.5, as described in Example 2. Select variants were screened in triplicate using the casein activity assay at pH=7.5 after a one hour pre-incubation at pH=4.5 in the presence of pepsin, as described in Example 2. Other select variants were screened in triplicate using the casein activity assay at pH=7.5 with a one-hour heat challenge at 63° C., as described in Example 2. Analysis of the average data relative to SEQ ID NO: 4 are listed in Table 9.1.

TABLE 9.1
Protease activity relative to SEQ ID NO: 4

| | Amino Acid | Unchallenged | Gastric | Thermo |
|---|---|---|---|---|
| SEQ ID | Differences | FIOP | Challenge FIOP | challenge FIOP |
| NO: | (Relative to | Relative to | Relative to | Relative to |
| (nt/aa) | SEQ ID NO: 4) | SEQ ID NO: 4 | SEQ ID NO: 4 | SEQ ID NO: 4 |
| 1711/1712 | A135G | + | + | + |
| 1713/1714 | A135S | + | + | |
| 1715/1716 | A135V | + | + | + |
| 1717/1718 | A135L | + | | |
| 1719/1720 | A135R | + | + | |
| 1721/1722 | A135E | ++ | | + |
| 1723/1724 | A135P | + | | |
| 1725/1726 | A135H | + | ++ | |
| 1727/1728 | A135C | + | | |
| 1729/1730 | A135T | + | + | |
| 1731/1732 | A135Y | + | | |
| 1733/1734 | A135W | + | | |
| 1735/1736 | A135M | + | | |
| 1737/1738 | A135N | + | + | |
| 1739/1740 | H137S | + | | |
| 1741/1742 | H137A | + | | |
| 1743/1744 | H137N | + | ++ | |
| 1745/1746 | H137D | + | | |
| 1747/1748 | N139R | + | + | + |
| 1749/1750 | N139E | + | | |
| 1751/1752 | N139F | + | | |
| 1753/1754 | N139L | + | ++ | ++ |
| 1755/1756 | N139K | + | + | ++ |
| 1757/1758 | N139D | + | | |
| 1759/1760 | N139H | + | | |
| 1761/1762 | N139I | + | | |
| 1763/1764 | N139S | + | | |
| 1765/1766 | N141T | + | ++ | ++ |
| 1767/1768 | N141S | + | ++ | ++ |
| 1769/1770 | N141V | + | +++ | +++ |
| 1771/1772 | N141L | + | + | ++ |
| 1773/1774 | N141R | + | ++ | ++ |
| 1775/1776 | N141M | + | ++ | ++ |
| 1777/1778 | N141G | + | | |
| 1779/1780 | N141Y | + | ++ | ++ |
| 1781/1782 | N141I | + | ++ | ++ |
| 1783/1784 | N141C | + | +++ | ++ |
| 1785/1786 | N141F | + | ++ | ++ |
| 1787/1788 | N141A | + | +++ | +++ |
| 1789/1790 | N141D | + | | + |
| 1791/1792 | N141E | + | ++ | ++ |
| 1793/1794 | N141H | + | + | + |
| 1795/1796 | H143T | + | | |
| 1797/1798 | H143C | + | | |
| 1799/1800 | H143Q | ++ | +++ | |
| 1801/1802 | H143A | ++ | +++ | |
| 1803/1804 | H143D | | + | |
| 1805/1806 | H143S | + | +++ | |
| 1807/1808 | H143N | + | +++ | ++ |
| 1809/1810 | N145Q | + | ++ | + |
| 1811/1812 | N145T | + | | + |
| 1813/1814 | N145V | + | | |
| 1815/1816 | N145H | + | | |
| 1817/1818 | N145L | + | | |
| 1819/1820 | N145E | + | ++ | + |
| 1821/1822 | N145R | ++ | + | |
| 1823/1824 | N145D | + | | |
| 1825/1826 | N145R | + | + | |
| 1827/1828 | N145A | + | | ++ |
| 1829/1830 | N145F | + | | |
| 1831/1832 | N145S | + | | + |
| 1833/1834 | N145G | + | | + |
| 1835/1836 | N145I | + | | |
| 1837/1838 | N145K | ++ | | + |
| 1839/1840 | N145M | ++ | | |
| 1841/1842 | N145C | + | | + |
| 1843/1844 | N145W | + | | |
| 1845/1846 | S157A | + | + | + |
| 1847/1848 | S157E | + | | |
| 1849/1850 | S157P | + | + | + |
| 1851/1852 | S157V | + | +++ | ++ |
| 1853/1854 | S157T | + | ++ | ++ |
| 1855/1856 | S157N | + | | + |
| 1857/1858 | S157R | + | ++ | + |
| 1859/1860 | S157G | + | + | + |
| 1861/1862 | S157L | + | | + |
| 1863/1864 | S157W | + | | |
| 1865/1866 | S157K | + | + | + |
| 1867/1868 | S157C | + | | + |
| 1869/1870 | S157D | + | | |
| 1871/1872 | S157Q | + | | + |
| 1873/1874 | S157M | + | | + |
| 1875/1876 | S157H | + | | + |
| 1877/1878 | S157I | + | ++ | ++ |
| 1879/1880 | S157F | + | | |
| 1881/1882 | S160R | + | | + |
| 1883/1884 | S160V | + | + | ++ |
| 1885/1886 | S160C | + | ++ | + |
| 1887/1888 | S160Q | + | + | + |
| 1889/1890 | S160A | + | + | + |
| 1891/1892 | S160P | + | + | ++ |
| 1893/1894 | S160L | + | ++ | ++ |
| 1895/1896 | S160F | + | ++ | + |
| 1897/1898 | S160T | ++ | + | ++ |
| 1899/1900 | S160D | + | | + |
| 1901/1902 | S160Y | + | | |
| 1903/1904 | S160W | ++ | | |
| 1905/1906 | S160E | + | + | + |
| 1907/1908 | S160K | + | + | + |
| 1909/1910 | S160N | + | | + |
| 1911/1912 | S160M | + | ++ | ++ |
| 1913/1914 | S214G | + | | |
| 1915/1916 | S214M | ++ | +++ | ++ |
| 1917/1918 | S214L | + | ++ | ++ |
| 1919/1920 | S214Q | + | + | ++ |
| 1921/1922 | S214T | ++ | + | + |
| 1923/1924 | S214P | + | ++ | ++ |
| 1925/1926 | S214R | ++ | + | + |
| 1927/1928 | S214D | + | ++ | + |
| 1929/1930 | S214F | + | + | + |
| 1931/1932 | S214K | + | ++ | + |
| 1933/1934 | S214A | + | + | ++ |
| 1935/1936 | S214V | ++ | ++ | +++ |
| 1937/1938 | S214I | + | +++ | ++ |
| 1939/1940 | S214E | + | + | + |
| 1941/1942 | S214H | + | | + |
| 1943/1944 | S214Y | ++ | + | ++ |
| 1945/1946 | S214C | + | +++ | ++ |
| 1947/1948 | S214W | + | | + |
| 1949/1950 | S221L | ++ | ++ | ++ |
| 1951/1952 | S221T | + | + | ++ |
| 1953/1954 | S221I | ++ | ++ | +++ |
| 1955/1956 | S221R | + | | ++ |
| 1957/1958 | S221D | + | + | ++ |
| 1959/1960 | S221A | ++ | + | + |
| 1961/1962 | S221C | ++ | ++ | ++ |
| 1963/1964 | S221V | + | + | ++ |
| 1965/1966 | S221F | ++ | | + |
| 1967/1968 | S221G | + | | |
| 1969/1970 | S221P | + | | |
| 1971/1972 | S221K | ++ | + | ++ |
| 1973/1974 | S221Y | ++ | | ++ |
| 1975/1976 | S221E | + | ++ | ++ |
| 1977/1978 | S221Q | + | + | ++ |
| 1979/1980 | S221M | ++ | ++ | ++ |
| 1981/1982 | S221H | ++ | | ++ |
| 1983/1984 | S221W | + | | + |
| 1985/1986 | S268V | + | + | |
| 1987/1988 | S268Y | ++ | + | + |
| 1989/1990 | S268A | + | + | + |
| 1991/1992 | S268Q | + | + | ++ |
| 1993/1994 | S268P | + | + | + |
| 1995/1996 | S268G | + | + | + |
| 1997/1998 | S268T | + | | |
| 1999/2000 | S268H | + | | + |
| 2001/2002 | S268I | + | ++ | |
| 2003/2004 | S268F | + | | |
| 2005/2006 | S268N | + | | ++ |
| 2007/2008 | V273S | + | ++ | + |
| 2009/2010 | V273C | + | + | +++ |
| 2011/2012 | V273A | + | + | |
| 2013/2014 | V273L | + | + | ++ |
| 2015/2016 | V273F | | + | |
| 2017/2018 | V273T | ++ | + | +++ |
| 2019/2020 | V273M | + | + | |
| 2021/2022 | Q279R | + | + | + |
| 2023/2024 | Q279E | + | ++ | + |
| 2025/2026 | Q279F | ++ | + | + |
| 2027/2028 | Q279G | + | + | + |
| 2029/2030 | Q279T | + | ++ | + |
| 2031/2032 | Q279M | + | + | ++ |
| 2033/2034 | Q279L | + | + | ++ |
| 2035/2036 | Q279S | + | + | + |
| 2037/2038 | Q279A | + | + | |
| 2039/2040 | Q279K | + | ++ | + |
| 2041/2042 | Q279V | + | ++ | + |
| 2043/2044 | Q279W | + | | |
| 2045/2046 | Q279Y | ++ | ++ | ++ |
| 2047/2048 | Q279H | + | | + |
| 2049/2050 | T311S | + | | + |
| 2051/2052 | T311D | + | ++ | +++ |
| 2053/2054 | T311Q | + | | + |
| 2055/2056 | T311M | + | | |
| 2057/2058 | T311K | + | | |
| 2059/2060 | T311G | + | + | |
| 2061/2062 | T311A | ++ | | |
| 2063/2064 | T311E | + | | +++ |
| 2065/2066 | S312V | + | + | + |
| 2067/2068 | S312D | + | | |
| 2069/2070 | S312G | + | | |
| 2071/2072 | S312R | + | ++ | ++ |
| 2073/2074 | S312W | + | + | |
| 2075/2076 | S312M | ++ | ++ | + |
| 2077/2078 | S312L | + | | |
| 2079/2080 | S312N | + | | |
| 2081/2082 | S312E | + | ++ | ++ |
| 2083/2084 | S312A | + | + | ++ |
| 2085/2086 | S312T | + | | |
| 2087/2088 | S312Y | + | + | + |
| 2089/2090 | S312P | + | | |
| 2091/2092 | S312H | + | + | + |
| 2093/2094 | S312Q | + | ++ | ++ |
| 2095/2096 | S312K | + | ++ | +++ |
| 2097/2098 | S312C | + | + | + |
| 2099/2100 | S312I | + | ++ | ++ |
| 2101/2102 | T315E | + | | + |
| 2103/2104 | T315S | + | | |
| 2105/2106 | T315L | + | | |
| 2107/2108 | T315R | ++ | | |
| 2109/2110 | T315G | + | | |
| 2111/2112 | T315A | ++ | | |
| 2113/2114 | T315M | + | | |
| 2115/2116 | T315Y | + | | |
| 2117/2118 | T315K | + | | |
| 2119/2120 | T315Q | + | | + |
| 2121/2122 | T315D | + | | |
| 2123/2124 | T315W | + | | |
| 2125/2126 | T315C | ++ | | |
| 2127/2128 | T315V | + | + | + |
| 2129/2130 | T315I | ++ | | + |
| 2131/2132 | T315H | + | | |
| 2133/2134 | T315F | + | | |
| 2135/2136 | S342F | + | | |
| 2137/2138 | S342G | + | ++ | ++ |
| 2139/2140 | S342R | ++ | | ++ |
| 2141/2142 | S342Q | + | | + |
| 2143/2144 | S342E | + | | + |
| 2145/2146 | S342V | + | | |
| 2147/2148 | S342T | + | | |
| 2149/2150 | S342C | ++ | + | ++ |
| 2151/2152 | S342N | ++ | + | ++ |
| 2153/2154 | S342I | + | | |
| 2155/2156 | S342P | + | | |
| 2157/2158 | S342M | + | | + |
| 2159/2160 | S342A | + | ++ | ++ |
| 2161/2162 | S342W | + | | |
| 2163/2164 | S342K | + | ++ | ++ |
| 2165/2166 | S342D | + | | |
| 2167/2168 | S342Y | + | | |
| 2169/2170 | T345G | + | | |
| 2171/2172 | T345R | + | ++ | + |
| 2173/2174 | T345L | + | | |
| 2175/2176 | T345V | + | + | |
| 2177/2178 | T345A | + | + | + |
| 2179/2180 | T345M | + | | ++ |
| 2181/2182 | T345W | + | | |
| 2183/2184 | T345I | | + | |
| 2185/2186 | T345S | ++ | | |
| 2187/2188 | T345E | + | | |
| 2189/2190 | T345Y | + | | |
| 2191/2192 | T345D | + | | |
| 2193/2194 | T345Q | + | + | |
| 2195/2196 | T345F | + | | |
| 2197/2198 | T345C | | + | + |
| 2199/2200 | T345K | | ++ | ++ |
| 2201/2202 | S346T | + | ++ | ++ |
| 2203/2204 | S346Q | + | | |
| 2205/2206 | S346V | + | + | ++ |
| 2207/2208 | S346R | ++ | | |
| 2209/2210 | S346P | ++ | | |
| 2211/2212 | S346L | + | | + |
| 2213/2214 | S346D | + | | |
| 2215/2216 | S346W | + | + | ++ |
| 2217/2218 | S346G | + | | |
| 2219/2220 | S346A | ++ | | |
| 2221/2222 | S346C | + | + | + |
| 2223/2224 | S346M | + | | + |
| 2225/2226 | S346F | | + | ++ |
| 2227/2228 | S346N | + | | |
| 2229/2230 | S346Y | ++ | | ++ |
| 2231/2232 | S346K | + | | |
| 2233/2234 | A402* | + | | + |
| 2235/2236 | G409* | + | | + |
| 2237/2238 | G410* | + | + | + |
| 2239/2240 | G412* | + | + | + |
| 2241/2242 | G413* | + | + | ++ |

Levels of increased activity were determined relative to the reference polypeptide of SEQ ID NO: 1710 and are defined as follows: “+” >1, “++”> 1.1, “+++” >1.3

[0372] While the invention has been described with reference to the specific embodiments, various changes can be made and equivalents can be substituted to adapt to a particular situation, material, composition of matter, process, process step or steps, thereby achieving benefits of the invention without departing from the scope of what is claimed.

[0373] For all purposes, each and every publication and patent document cited in this disclosure is incorporated herein by reference as if each such publication or document was specifically and individually indicated to be incorporated herein by reference. Citation of publications and patent documents is not intended as an indication that any such document is pertinent prior art, nor does it constitute an admission as to its contents or date.

1. An engineered protease polypeptide, or a biologically active fragment thereof, comprising an amino acid sequence having at least 70%, 75%, 80%, 81%, 82%, 83%, 84%, 85%, 86%, 87%, 88%, 89%, 90%, 91%, 92%, 93%, 94%, 95%, 96%, 97%, 98%, or 99%, or more sequence identity to a reference sequence corresponding to residues 135-413 of SEQ ID NO: 4, 628, 948, 1126, 1368, or 1548, or to a reference sequence corresponding to SEQ ID NO: 4, 628, 948, 1126, 1368, or 1548, wherein the amino acid sequence comprises one or more substitutions relative to the reference sequence corresponding to residues 135-413 of SEQ ID NO: 4, 628, 948, 1126, 1368, or 1548, or relative to the reference sequence corresponding to SEQ ID NO: 4, 628, 948, 1126, 1368, or 1548.

2. (canceled)

3. (canceled)

4. The engineered protease polypeptide of claim 1, comprising an amino acid sequence having at least 70%, 75%, 80%, 81%, 82%, 83%, 84%, 85%, 86%, 87%, 88%, 89%, 90%, 91%, 92%, 93%, 94%, 95%, 96%, 97%, 98%, or 99%, or more sequence identity to a reference sequence corresponding to residues 135-413 of an even-numbered SEQ ID NO. of SEQ ID NOs: 6-1710, or to a reference sequence corresponding to an even-numbered SEQ ID NO. of SEQ ID NOs: 6-1710, wherein the amino acid sequence comprises one or more substitutions relative to the reference sequence corresponding to residues 135-413 of SEQ ID NO: 4 or 628, or relative to the reference sequence corresponding to SEQ ID NO: 4 or 628.

5. The engineered protease polypeptide of claim 1, wherein the amino acid sequence of the engineered protease polypeptide comprises at least a substitution at amino acid position 11, 31, 42, 45, 50, 53, 84, 99, 100, 126, 128, 129, 130, 131, 132, 134, 135, 136, 137, 138, 139, 140, 141, 143, 145, 151, 154, 156, 157, 159, 160, 161, 162, 163, 169, 172, 173, 174, 179, 180, 184, 185, 186, 187, 188, 190, 191, 192, 193, 194, 198, 199, 212, 214, 220, 221, 222, 223, 225, 231, 232, 233, 235, 237, 238, 239, 240, 242, 243, 245, 246, 249, 250, 251, 252, 253, 254, 256, 258, 262, 263, 264, 265, 266, 267, 268, 269, 271, 273, 274, 275, 277, 278, 279, 280, 281, 283, 285, 290, 292, 293, 294, 296, 297, 300, 302, 303, 311, 312, 313, 314, 315, 316, 318, 324, 328, 336, 339, 341, 342, 343, 345, 346, 355, 358, 360, 364, 367, 368, 369, 370, 371, 372, 373, 374, 375, 377, 381, 382, 384, 386, 389, 391, 392, 401, 402, 405, 406, 409, 410, 411, 412, or 413, or combinations thereof, wherein the amino acid positions are relative to the reference sequence corresponding to residues 135-413 of SEQ ID NO: 4 or 628, or relative to the reference sequence corresponding to SEQ ID NO: 4 or 628.

6. The engineered protease polypeptide of claim 1, wherein the amino acid sequence of the engineered protease polypeptide comprises at least a substitution 11K, 31G, 42W, 45Y, 50R, 53A, 84M, 99V, 100V, 126T, 128G/I/K/L/P/R/S/T/V, 129E/F/H/I/K/L/R/S/T/V, 130A/F/G/N/V, 131E/P/R/T/V/Y, 132A/C/D/E/G/P/R/V/Y, 134A/C/D/E/G/I/L/M/N/P/S/T/V/W/Y, 135C/E/G/H/I/K/L/M/N/P/R/S/T/V/W/Y, 136C/G/I/M, 137A/D/N/S, 138Q, 139C/D/E/F/H/I/K/L/M/R/S, 140L, 141A/C/D/E/F/G/H/I/L/M/Q/R/S/T/V/W/Y, 143A/C/D/N/Q/S/T, 145A/C/D/E/F/G/H/I/K/L/P/Q/R/S/T/V/W, 151D/Q, 154C/D/L/R, 156C/V, 157A/C/D/E/F/G/H/I/K/L/M/N/P/Q/R/T/V/W, 159G, 160A/C/D/E/F/K/L/M/N/P/R/Q/T/V/W/Y, 161D/E/G/L/R, 1621, 163H/L, 169S, 172Q, 173F/S, 174L, 179K/S, 180H/L/M, 184A/D/G/L/M/Q/R, 185A/D/E/F/G/L/M/P/Q/R/S/T/V, 186A/R/S/T/Y, 187A, 188A/C/D/F/G/L/M/S/T/W, 190S, 191R, 192C/D/M/N, 193T, 194A/D/L/T, 198G, 199C/K/L, 212S, 214A/C/D/E/F/G/H/I/K/L/M/N/P/Q/R/T/V/W/Y, 220K/L/R, 221A/C/D/E/F/G/H/I/K/L/M/P/Q/R/T/V/W/Y, 222G, 223S, 225V, 231H/V, 232S, 233G/I/L, 235Q/R/V, 237A/G, 238Q, 239L/M, 240A/L, 242E/S, 243E/L/M/R/S/T, 245L/V, 246I/V, 249G/M/S, 250A/C/F/L/N/T, 251D/S, 252P, 253C/I/V, 254C/E, 256L/M, 258W, 262A/S, 263E/H/P/Q/R/S, 264A/C/F/I/L/N/P/R/T/V, 265C/G/R, 266H/T/Y, 267A/G/H/I/L/M/R/S/T/V/W, 268A/F/G/H/I/N/P/Q/T/V/Y, 269Q/T, 271A, 273A/C/F/L/M/S/T, 274A/G/K/L/T/V/W, 275A/V, 277D/G, 278L/N/S/V/Y, 279A/E/F/G/H/K/L/M/R/S/T/Y/V/W, 280D/K/S/T, 281C/V, 283M, 285S, 290E/G/S, 292V, 293A, 294V/W, 296M/R, 297F, 300R/V, 302G/P, 303A/V, 311A/E/D/G/K/M/Q/S, 312A/C/D/E/G/H/I/K/L/M/N/P/Q/R/T/V/W/Y, 313A/Q/S/T, 314G, 315A/C/D/E/F/G/H/I/K/L/M/Q/R/S/V/W/Y, 316K, 318N/P/R, 324A/D/E/I/R/V/W/Y, 328L/M, 336F, 339S/W, 341G, 342A/C/D/E/F/G/I/K/M/N/P/R/Q/T/V/W/Y, 343S, 345A/C/D/E/F/G/I/K/L/M/Q/R/S/V/W/Y, 346A/C/D/F/G/K/L/M/N/P/Q/R/T/V/W/Y, 355A, 358S, 360S, 364A/V, 367V, 368G/T, 369I/V/W, 370C/E/F/G/I/K/L/P/Q/R/S/V, 371L, 372A/C/F/L/R/V/Y, 373A/C/E/F/M/S/Y, 374E/G/L/R/S/W/Y, 375A/E/I/L/M/S/T/V, 377H, 381N, 382G/R/S/T, 384C, 386P/W, 389C/P, 391L/S, 392Y, 401L, 402G/*, 405L/Q, 406C/M/R/W, 409E/R/*, 410C/I/W/*, 411L/R/T/V, 412P/T/*, or 413A/C/D/S/*, or combinations thereof, wherein the amino acid positions are relative to the reference sequence corresponding to residues 135-413 of SEQ ID NO: 4 or 628, or relative to the reference sequence corresponding to SEQ ID NO: 4 or 628.

7-9. (canceled)

10. The engineered protease polypeptide of claim 1, wherein the amino acid sequence of the engineered protease polypeptide comprises at least a substitution set at amino acid positions 135/141/160/311/315/372, 143/328/342/345, 139/157/268/273/312/346, or 137/139/214/279, wherein the amino acid positions are relative to the reference sequence corresponding to residues 135-413 of SEQ ID NO: 4 or 628, or relative to the reference sequence corresponding to SEQ ID NO: 4 or 628.

11. (canceled)

12. (canceled)

13. The engineered protease polypeptide of claim 1, wherein the amino acid sequence of the engineered protease polypeptide comprises at least a substitution or substitution set at amino acid position(s) 185, 134, 129, 135, 184, 132, 186, 193, 263, 370, 45/134, 199, 368, 161, 141, 267, 179, 264, 160, 138, 131, 372, 151, 274, 128, 339, 313, 374, 314, 191, 324, 315, 375, 136, 220, 194, 231, 277, 369, 251, 180, 163, 343, 264/279, 279, 232, 141/300, 367, 266, 188, 130, 318, 265, 341, 190, 145, 126/192, 11/220, 192, 370/392, 99/278, 265/311, 84/159/265/279/311/370, 311/316, 342/370, 265/311/370, 192/311/316, 141/154/192, 265/311/316/342, 279/311/316, 141/265/279/311/342, 141/192/311/316/370, 141/265/311, 198/279, 392, 342/370/392, 141/198/265, 265/392, 184/267, 342, 312, 100/251, 141/220, 311/316/370, 99, 278, 405, 311/342/370, 141/198, 311/342, 141/311, 279/311/377/392, 186/198/311/342/370/392, 141/392, 311/370/392, 141/311/392, 311/370, 311/316/392, 265/311/392, 141/192, 311, 141/265/311/392, 192/311/370/392, 198/265/311/316/370, 141/186/265/311, or 141/198/265/311/370, wherein the amino acid positions are relative to the reference sequence corresponding to residues 135-413 of SEQ ID NO: 4 or 628, or relative to the reference sequence corresponding to SEQ ID NO: 4 or 628.

14. (canceled)

15. (canceled)

16. The engineered protease polypeptide of claim 1, wherein the amino acid sequence of the engineered protease polypeptide comprises at least a substitution at amino acid position 135, 137, 139, 141, 143, 145, 145, 157, 160, 214, 221, 268, 273, 279, 311, 312, 315, 315, 342, 345, 346, 402, 409, 410, 412, or 413, or combinations thereof, wherein the amino acid positions are relative to the reference sequence corresponding to residues 135-413 of SEQ ID NO: 4 or 628, or relative to the reference sequence corresponding to SEQ ID NO: 4 or 628.

17. (canceled)

18. The engineered protease polypeptide of claim 1, wherein the amino acid sequence of the engineered protease polypeptide comprises at least a substitution or substitution set at amino acid position(s) 242, 157, 250, 373, 243, 336, 187, 240, 280, 271, 237, 386, 382, 328, 42, 391, 381, 275, 249, 239, 384, 139, 364, 346, 389, 254, 246, 345, 360, 303, 300, 269, 135/141/372, 311/315/372, 136/141/311, 141/188, 135/136, 135/141/315, 372, 135/141/160/267/372, 135/136/141/160/185/188/267/311/315, 160/185, 135/141/188/279/311, 135/136/141, 135/136/141/372, 135/141/160/185/267/279, 135/141/160/267, 141/188/311/372, 160/185/188/279/311, 136/141/279, 135/136/141/160/185/188, 141/372, 135/136/141/311, 185/311/315/372, 135/141/188, 136/185, 135/141, 135/136/141/279/315/372, 135/311/315, 141, 311/372, 188/311, 135/141/188/372, 141/160/279, 313/392, 342/392, 279/392, 128, 198/342, 313, 128/312, 50, 145/263, 313/342, 279/312, 312/392, 279/342, 128/342, 342, 263, 143, 262, 156, 169, 143/237, 136/160/185/267/311/372, 135/160/311/372, 135/141/311/315, 141/311/315, 136/141/160/185/188/311/315/372, 135/141/311/315/372, 135/141/160/185/311/315, 135/141/267/311/315/372, 135/136/141/160/311/315, 135/136/141/279, 135/141/267/279/311/315, 135/141/160, 135/141/160/311/315/372, 135/141/160/311/315, 135/136/141/188/311, 141/160/311, 135/141/160/279/311/315/372, 141/160/185/279/311/372, 135/136/141/160/315/372, 135/136/160/279/311/372, 128/279/312/342, 128/198/312/342, 263/342, 145/263/279/312/342/392, or 128/145/198/312/313/392, wherein the amino acid positions are relative to the reference sequence corresponding to residues 135-413 of SEQ ID NO: 4 or 628, or relative to the reference sequence corresponding to SEQ ID NO: 4 or 628.

19-27. (canceled)

28. The engineered protease polypeptide of claim 1, comprising an amino acid sequence having at least 70%, 75%, 80%, 81%, 82%, 83%, 84%, 85%, 86%, 87%, 88%, 89%, 90%, 91%, 92%, 93%, 94%, 95%, 96%, 97%, 98%, or 99%, or more sequence identity to a reference sequence corresponding to residues 135-413 of an even-numbered SEQ ID NO. of SEQ ID NOs: 6-1710, or to a reference sequence corresponding to an even-numbered SEQ ID NO. of SEQ ID NOs: 6-1710, wherein the amino acid sequence comprises one or more substitutions relative to the reference sequence corresponding to residues 135-413 of SEQ ID NO: 948, 1126, 1368, or 1548, or relative to the reference sequence corresponding to SEQ ID NO: 948, 1126, 1368, or 1548.

29. The engineered protease polypeptide of claim 1, comprising an amino acid sequence having at least 70%, 75%, 80%, 81%, 82%, 83%, 84%, 85%, 86%, 87%, 88%, 89%, 90%, 91%, 92%, 93%, 94%, 95%, 96%, 97%, 98%, or 99%, or more sequence identity to the reference sequence corresponding to residues 135-413 of SEQ ID NO: 948, 1126, 1368, or 1548, or to the reference sequence corresponding to SEQ ID NO: 948, 1126, 1368, or 1548, wherein the amino acid sequence comprises one or more substitutions relative to the reference sequence corresponding to residues 135-413 of SEQ ID NO: 948, 1126, 1368, or 1548, or relative to the reference sequence corresponding to SEQ ID NO: 948, 1126, 1368, or 1548.

30. The engineered protease polypeptide of claim 28, wherein the amino acid sequence of the engineered protease polypeptide comprises at least a substitution at amino acid position 11, 31, 42, 45, 50, 53, 84, 99, 100, 126, 128, 129, 130, 131, 132, 134, 135, 136, 137, 138, 139, 140, 141, 143, 145, 151, 154, 156, 157, 159, 160, 161, 162, 163, 169, 172, 173, 174, 179, 180, 184, 185, 186, 187, 188, 190, 191, 192, 193, 194, 198, 199, 212, 214, 220, 221, 222, 223, 225, 231, 232, 233, 235, 237, 238, 239, 240, 242, 243, 245, 246, 249, 250, 251, 252, 253, 254, 256, 258, 262, 263, 264, 265, 266, 267, 268, 269, 271, 273, 274, 275, 277, 278, 279, 280, 281, 283, 285, 290, 292, 293, 294, 296, 297, 300, 302, 303, 311, 312, 313, 314, 315, 316, 318, 324, 328, 336, 339, 341, 342, 343, 345, 346, 355, 358, 360, 364, 367, 368, 369, 370, 371, 372, 373, 374, 375, 377, 381, 382, 384, 386, 389, 391, 392, 401, 402, 405, 406, 409, 410, 411, 412, or 413, or combinations thereof, wherein the amino acid positions are relative to the reference sequence corresponding to residues 135-413 of SEQ ID NO: 948, 1126, 1368, or 1548, or to the reference sequence corresponding to SEQ ID NO: 948, 1126, 1368, or 1548.

31. The engineered protease polypeptide of claim 28, wherein the amino acid sequence of the engineered protease polypeptide comprises at least a substitution or amino acid residue 11K, 31G, 42W, 45Y, 50R, 53A, 84M, 99V, 100V, 126T, 128G/I/K/L/P/R/S/T/V, 129E/F/H/I/K/L/R/S/T/V, 130A/F/G/N/V, 131E/P/R/T/V/Y, 132A/C/D/E/G/P/R/V/Y, 134A/C/D/E/G/I/L/M/N/P/S/T/V/W/Y, 135A/C/E/G/H/I/K/L/M/N/P/R/S/T/V/W/Y, 136C/G/I/M, 137A/D/N/S, 138Q, 139C/D/E/F/H/I/K/L/M/N/R/S, 140L, 141A/C/D/E/F/G/H/I/L/M/N/Q/R/S/T/V/W/Y, 143A/C/D/H/N/Q/S/T, 145A/C/D/E/F/G/H/I/K/L/P/Q/R/S/T/V/W, 151D/Q, 154C/D/L/R, 156C/V, 157A/C/D/E/F/G/H/I/K/L/M/N/P/Q/R/S/T/V/W, 159G, 160A/C/D/E/F/K/L/M/N/P/R/Q/S/T/V/W/Y, 161D/E/G/L/R, 162I, 163H/L, 169S, 172Q, 173F/S, 174L, 179K/S, 180H/L/M, 184A/D/G/L/M/Q/R, 185A/D/E/F/G/L/M/P/Q/R/S/T/V, 186A/R/S/T/Y, 187A, 188A/C/D/F/G/L/M/S/T/W, 190S, 191R, 192C/D/M/N, 193T, 194A/D/L/T, 198G, 199C/K/L, 212S, 214A/C/D/E/F/G/H/I/K/L/M/N/P/Q/R/T/V/W/Y, 220K/L/R, 221A/C/D/E/F/G/H/I/K/L/M/P/Q/R/T/V/W/Y, 222G, 223S, 225V, 231H/V, 232S, 233G/I/L, 235Q/R/V, 237A/G, 238Q, 239L/M, 240A/L, 242E/S, 243E/L/M/R/S/T, 245L/V, 246I/V, 249G/M/S, 250A/C/F/L/N/T, 251D/S/T, 252P, 253C/I/V, 254C/E, 256L/M, 258W, 262A/S, 263E/H/P/Q/R/S, 264A/C/F/I/L/N/P/R/T/V, 265C/G/R, 266H/T/Y, 267A/G/H/I/L/M/R/S/T/V/W, 268A/F/G/H/I/N/P/Q/S/T/V/Y, 269Q/T, 271A, 273A/C/F/L/M/S/T/V, 274A/G/K/L/T/V/W, 275A/V, 277D/G, 278L/N/S/V/Y, 279A/E/F/G/H/K/L/M/R/S/T/Y/V/W, 280D/K/S/T, 281C/V, 283M, 285S, 290E/G/S, 292V, 293A, 294V/W, 296M/R, 297F, 300R/V, 302G/P, 303A/V, 311A/E/D/G/K/M/Q/S/T, 312A/C/D/E/G/H/I/K/L/M/N/P/Q/R/S/T/V/W/Y, 313A/Q/S/T, 314G, 315A/C/D/E/F/G/H/I/K/L/M/Q/R/S/T/V/W/Y, 316K, 318N/P/R, 324A/D/E/I/R/V/W/Y, 328L/M/V, 336F, 339S/W, 341G, 342A/C/D/E/F/G/I/K/M/N/P/R/Q/S/T/V/W/Y, 343S, 345A/C/D/E/F/G/I/K/L/M/Q/R/S/V/W/Y, 346A/C/D/F/G/K/L/M/N/P/Q/R/S/T/V/W/Y, 355A, 358S, 360S, 364A/V, 367V, 368G/T, 369I/V/W, 370C/E/F/G/I/K/L/P/Q/R/S/V, 371L, 372A/C/F/L/R/S/V/Y, 373A/C/E/F/M/S/Y, 374E/G/L/R/S/W/Y, 375A/E/I/L/M/S/T/V, 377H, 381N, 382G/R/S/T, 384C, 386P/W, 389C/P, 391L/S, 392Y, 401L, 402G/*, 405L/Q, 406C/M/R/W, 409E/R/*, 410C/I/W/*, 411L/R/T/V, 412P/T/*, or 413A/C/D/S/*, or combinations thereof, wherein the amino acid positions are relative to the reference sequence corresponding to residues 135-413 of SEQ ID NO: 948, 1126, 1368, or 1548, or to the reference sequence corresponding to SEQ ID NO: 948, 1126, 1368, or 1548.

32-34. (canceled)

35. The engineered protease polypeptide of claim 28, comprising an amino acid sequence having at least 70%, 75%, 80%, 81%, 82%, 83%, 84%, 85%, 86%, 87%, 88%, 89%, 90%, 91%, 92%, 93%, 94%, 95%, 96%, 97%, 98%, or 99%, or more sequence identity to the reference sequence corresponding to residues 135-413 of SEQ ID NO: 948, or to the reference sequence corresponding to SEQ ID NO: 948, wherein the amino acid sequence comprises one or more substitutions relative to the reference sequence corresponding to residues 135-413 of SEQ ID NO: 948, or relative to the reference sequence corresponding to SEQ ID NO: 948.

36. The engineered protease polypeptide of claim 28, comprising an amino acid sequence having at least 70%, 75%, 80%, 81%, 82%, 83%, 84%, 85%, 86%, 87%, 88%, 89%, 90%, 91%, 92%, 93%, 94%, 95%, 96%, 97%, 98%, or 99%, or more sequence identity to a reference sequence corresponding to residues 135-413 of an even-numbered SEQ ID NO. of SEQ ID NOs: 950-1154, or to a reference sequence corresponding to an even-numbered SEQ ID NO. of SEQ ID NOs: 950-1154, wherein the amino acid sequence comprises one or more substitutions relative to the reference sequence corresponding to residues 135-413 of SEQ ID NO: 948, or relative to the reference sequence corresponding to SEQ ID NO: 948.

37. The engineered protease polypeptide of claim 35, wherein the amino acid sequence of the engineered protease polypeptide comprises at least a substitution or substitution set at amino acid position(s) 411, 402, 285, 245, 266, 355, 258, 222, 140, 268, 225, 283, 406, 410, 143/145/243/312, 139/143/145/157/312, 139/157/345, 139/269, 156/157/342/346, 139/143, 269, 139/243/328, 269/328, 143/145/169, 328, 143/145/262, 145/262/312/328, 139/156/157, 139/145/312, 312, 139, 139/312, 139/156, 139/143/145/243, 145/157, 145/346, 145/262/312/328/345/346, 145/262, 312/342, 143/243, 139/345, 342, 143/145/262/342, 139/143/169, 139/143/145/312, 169, 139/145/262/312/328/342/345/346, 139/328, 139/243, 139/143/328, 139/143/243, 139/145, 145/312, 145/169, 139/143/157/312, 84/139/143, 145/269, 143/145/157/269/312/328, 143/145/269, 157, 139/143/312, 256, 273, 409, 172, 401, 281, 253, 143/145/243/328, 145, 139/143/145/328/342/345, 143/328/342/345, 145/342/345, 143, 139/145/328/342/345, 143/145/169/312/328/345/346, 143/243/328/342/345/346, 139/143/157/169/328/346, 143/145/156/312/328, 139/145/157/312/328, 143/328/342/345/346, 143/145, 143/145/312/342/345, or 143/145/328, wherein the amino acid positions are relative to the reference sequence corresponding to residues 135-413 of SEQ ID NO: 948, or to the reference sequence corresponding to SEQ ID NO: 948.

38. (canceled)

39. (canceled)

40. The engineered protease polypeptide of claim 28, comprising an amino acid sequence having at least 70%, 75%, 80%, 81%, 82%, 83%, 84%, 85%, 86%, 87%, 88%, 89%, 90%, 91%, 92%, 93%, 94%, 95%, 96%, 97%, 98%, or 99%, or more sequence identity to the reference sequence corresponding to residues 135-413 of SEQ ID NO: 1126, or to the reference sequence corresponding to SEQ ID NO: 1126, wherein the amino acid sequence comprises one or more substitutions relative to the reference sequence corresponding to residues 135-413 of SEQ ID NO: 1126, or relative to the reference sequence corresponding to SEQ ID NO: 1126.

41. The engineered protease polypeptide of claim 28, comprising an amino acid sequence having at least 70%, 75%, 80%, 81%, 82%, 83%, 84%, 85%, 86%, 87%, 88%, 89%, 90%, 91%, 92%, 93%, 94%, 95%, 96%, 97%, 98%, or 99%, or more sequence identity to a reference sequence corresponding to residues 135-413 of an even-numbered SEQ ID NO. of SEQ ID NOs: 1156-1422, or to a reference sequence corresponding to an even-numbered SEQ ID NO. of SEQ ID NOs: 1156-1422, wherein the amino acid sequence comprises one or more substitutions relative to the reference sequence corresponding to residues 135-413 of SEQ ID NO: 1126, or relative to the reference sequence corresponding to SEQ ID NO: 1126.

42. The engineered protease polypeptide of claim 40, wherein the amino acid sequence of the engineered protease polypeptide comprises at least a substitution or substitution set at amino acid position(s) 279, 250, 154, 214, 249, 275, 137, 161, 180, 174, 139, 254, 145, 278, 136, 154/413, 294, 237, 274, 264, 185, 277, 293, 233, 173, 312, 302, 238, 135, 221, 290, 263, 267, 239, 163, 292, 246, 243, 235, 156, 223, 278/413, 297, 194, 251, 253/411, 145/157/253/268/273/281/312/346/411, 139/346, 253, 346/411, 253/346, 312/346, 273/312, 253/281, 157/253/273/312/346/411, 139/157/253/268/273/281/312/346, 253/273/411, 139/253/268/273/281, 139/157/411, 157, 273, 139/253/268/273/281/312/411, 157/253/411, 139/145/253/346, 139/157/253/273/312, 139/157/268/273/312/346, 157/273/312/346, 139/411, 139/253/268/273/281/312/346/411, 157/273/346/411, 139/145/157/162/253/273/281/312, 139/253/273/281/312, 157/253/268/273/281/312, 139/253/268, 139/157/312, 253/273/281/346, 157/253/312/346/411, 157/273/312/346/411, 139/145/157/253/268/281/312, 139/273/312/346, 157/253/268/273/312/346, 139/268/346, 268/273/312/346, 139/157/253/268/273/312, 139/157/253, 139/253/281, 139/157/253/268/273, 253/312/411, or 139/268/273, wherein the amino acid positions are relative to the reference sequence corresponding to residues 135-413 of SEQ ID NO: 1126, or to the reference sequence corresponding to SEQ ID NO: 1126.

43. (canceled)

44. The engineered protease polypeptide of claim 28, comprising an amino acid sequence having at least 70%, 75%, 80%, 81%, 82%, 83%, 84%, 85%, 86%, 87%, 88%, 89%, 90%, 91%, 92%, 93%, 94%, 95%, 96%, 97%, 98%, or 99%, or more sequence identity to the reference sequence corresponding to residues 135-413 of SEQ ID NO: 1368, or to the reference sequence corresponding to SEQ ID NO: 1368, wherein the amino acid sequence comprises one or more substitutions relative to the reference sequence corresponding to residues 135-413 of SEQ ID NO: 1368, or relative to the reference sequence corresponding to SEQ ID NO: 1368.

45. The engineered protease polypeptide of claim 28, comprising an amino acid sequence having at least 70%, 75%, 80%, 81%, 82%, 83%, 84%, 85%, 86%, 87%, 88%, 89%, 90%, 91%, 92%, 93%, 94%, 95%, 96%, 97%, 98%, or 99%, or more sequence identity to a reference sequence corresponding to residues 135-413 of an even-numbered SEQ ID NO. of SEQ ID NOs: 1424-1608, or to a reference sequence corresponding to an even-numbered SEQ ID NO. of SEQ ID NOs: 1424-1608, wherein the amino acid sequence comprises one or more substitutions relative to the reference sequence corresponding to residues 135-413 of SEQ ID NO: 1368, or relative to the reference sequence corresponding to SEQ ID NO: 1368.

46. The engineered protease polypeptide of claim 44, wherein the amino acid sequence of the engineered protease polypeptide comprises at least a substitution or substitution set at amino acid position(s) 31, 318, 296, 252, 303, 253, 413, 386, 312, 235, 412, 342, 302, 371, 405, 389, 391, 358, 139/273/311/328/372, 311, 372, 139/143/157/160/268/273/311/315, 143, 139/143, 139/160/312/372, 143/273/328, 346, 135/139/160/268/312/342/346, 139/141/273, 135/141/143/268/273/312/372, 139/141/143/311, 139/157/268/328/346/372, 53/139/141/143/273/372, 139, 139/141/143/273/312, 137/139/221/233/413, 233, 221/279, 137/139/233/279, 221, 139/214, 137/139/156, 139/214/221, 214/233, 137/139/221/233/279, 137/139/221, 137/139, 137/139/279, 137, 137/139/214/279, 266, 139/221, 137/221, 137/156/214/312, 137/221/233, 137/139/156/221, 137/139/214, 279, 137/139/233, 137/139/214/233, 221/413, 137/214/233, 137/156, 137/139/221/233, 214/221, 137/221/413, 214, 137/233, 137/413, 137/221/279, 137/139/156/214/233/413, or 137/139/156/214, wherein the amino acid positions are relative to the reference sequence corresponding to residues 135-413 of SEQ ID NO: 1368, or relative to the reference sequence corresponding to SEQ ID NO: 1368.

47. (canceled)

48. The engineered protease polypeptide of claim 28, comprising an amino acid sequence having at least 70%, 75%, 80%, 81%, 82%, 83%, 84%, 85%, 86%, 87%, 88%, 89%, 90%, 91%, 92%, 93%, 94%, 95%, 96%, 97%, 98%, or 99%, or more sequence identity to the reference sequence corresponding to residues 135-413 of SEQ ID NO: 1548, or to the reference sequence corresponding to SEQ ID NO: 1548, wherein the amino acid sequence comprises one or more substitutions relative to the reference sequence corresponding to residues 135-413 of SEQ ID NO: 1548, or relative to the reference sequence corresponding to SEQ ID NO: 1548.

49. The engineered protease polypeptide of claim 28, comprising an amino acid sequence having at least 70%, 75%, 80%, 81%, 82%, 83%, 84%, 85%, 86%, 87%, 88%, 89%, 90%, 91%, 92%, 93%, 94%, 95%, 96%, 97%, 98%, or 99%, or more sequence identity to a reference sequence corresponding to residues 135-413 of an even-numbered SEQ ID NO. of SEQ ID NOs: 1610-1710, or to a reference sequence corresponding to an even-numbered SEQ ID NO. of SEQ ID NOs: 1610-1710, wherein the amino acid sequence comprises one or more substitutions relative to the reference sequence corresponding to residues 135-413 of SEQ ID NO: 1548, or relative to the reference sequence corresponding to SEQ ID NO: 1548.

50. The engineered protease polypeptide of claim 48, wherein the amino acid sequence of the engineered protease polypeptide comprises at least a substitution or substitution set at amino acid position(s) 145/273/372, 145/256/273, 221/243/273/328/372, 372, 145/221/279/372/406, 273/328, 145/169/273/346/406, 256/273, 145/221/273/328/346/406, 243/273, 145/214/256/273/279/328/372, 169/221/328/372/406, 372/406, 169/328/372/406, 221/372, 145/221/273/328/372, 214/243/273/328, 145/221, 214/256/273/346/372, 221/406, 169/372, 145/214/221/273, 145/221/346/372, 243/273/328/372/406, 145/169/273/328/346, 328, 169/273/372, 145/221/328, 169/214/273, 221/273/328, 221, 145/328, 214/346, 312, 212, 279, 212/312, 145, 179/346, 214, 346, 315/372, 375, 264, 179, 185, 220/372, or 324, wherein the amino acid positions are relative to the reference sequence corresponding to residues 135-413 of SEQ ID NO: 1548, or relative to the reference sequence corresponding to SEQ ID NO: 1548.

51-56. (canceled)

57. The engineered protease polypeptide of claim 1, comprising an amino acid sequence comprising residues 135-413 of an even-numbered SEQ ID NO. of SEQ ID NOs: 6-1710, or an amino acid sequence comprising an even-numbered SEQ ID NO. of SEQ ID NOs: 6-1710, wherein optionally the amino acid sequence comprises 1, 2, 3, 4, 5, 6, 7, 8, 9 or up to 10 substitutions.

58. (canceled)

59. The engineered protease polypeptide of claim 1, wherein the amino acid sequence of the engineered protease polypeptide comprises amino acid residues 135-413 or amino acid residues 128-413, wherein the engineered protease polypeptide is proteolytically active or is an active protease.

60-64. (canceled)

65. The engineered protease polypeptide of claim 59, wherein the proteolytic active polypeptide or active protease is characterized by an improved property selected from:
i) increased protease activity, ii) increased resistance to pepsin, iii) increased stability and/or activity at acidic pH, iv) increased stability and/or activity at neutral pH, or v) increased thermostability, or any combination of i), ii), iii), iv), and v) as compared to a reference protease, wherein the reference protease has an amino acid sequence corresponding to residues 135-413 of SEQ ID NO: 4, 628, 948, 1126, 1368, or 1548, or an amino acid sequence corresponding to SEQ ID NO: 4, 628, 948, 1126, 1368, or 1548.

66. (canceled)

67. (canceled)

68. The engineered protease polypeptide of claim 1, further comprising a Big1 domain at or fused to the carboxy terminus of the engineered protease polypeptide.

69-71. (canceled)

72. The engineered protease polypeptide of claim 1, further comprising a signal sequence.

73. (canceled)

74. An engineered protease polypeptide comprising at least a carboxy terminal deletion of SEQ ID NO: 2, wherein the deletion maintains protease activity of the mature form of SEQ ID NO: 2 with the carboxy terminal deletion.

75. The engineered protease polypeptide of claim 74, wherein the carboxy terminal deletion comprises deletion of the Big1 domain.

76. (canceled)

77. The engineered protease polypeptide of claim 75, further comprising 1, 2, 3, 4, 5, 6, 7, 8, 9, or up to 10 amino acid deletions of the carboxy terminus at amino acid residue 413 of SEQ ID NO: 2, wherein the further amino acid deletion(s) maintains proteolytic activity of the mature form of SEQ ID NO: 2 having the further amino acid deletions.

78. The engineered protease polypeptide of claim 74, wherein the mature form has an amino terminus at amino acid residue 128 or 135 of SEQ ID NO: 2.

79. (canceled)

80. A recombinant polynucleotide comprising a polynucleotide sequence encoding an engineered protease polypeptide of claim 1.

81-85. (canceled)

86. An expression vector comprising a recombinant polynucleotide of claim 80.

87. (canceled)

88. (canceled)

89. A host cell comprising an expression vector of claim 86.

90. (canceled)

91. A method of producing an engineered protease polypeptide, comprising culturing a host cell of claim 89 under suitable conditions such that the encoded engineered protease is expressed or produced.

92. (canceled)

93. (canceled)

94. A method of preparing a proteolytically active protease polypeptide comprising incubating an engineered protease polypeptide of claim 1 under suitable conditions such that the proteolytically active protease polypeptide or active protease is produced.

95-97. (canceled)

98. A pharmaceutical composition comprising an engineered protease polypeptide of claim 1.

99-104. (canceled)

105. A method of treating a disease or condition associated with a deficiency in pancreatic enzymes, the method comprising administering to a subject in need thereof an effective amount of an engineered protease polypeptide of claim 1.

106-111. (canceled)

The application's sequence listing, which the Patent Office published only in electronic form, follows.

SEQUENCE LISTING (2242 sequences)

SEQ ID NO: 1 - DNA, 1599 bp, synthetic construct
  misc_feature 1..1599: note = his-tagged wild type serine peptidase from Bacillus sinesaloumensis
  source 1..1599: mol_type = other DNA
atggcagatcaagctagtcaagctaatggaaaccaggacgtcattgaaggcgagctgatcgtttcagtggaaccgaagaacggtaaacctgatgtgagcattcaaagtgcacaatccgtaacagggcaggaagacgtccttaaatcgaaaggctttacgatcgttgataccttgcatgtagaggatagcagcgtcaagccactcgtctcgaagaatttcaataagaaagtggtggagaagatgggactggtgtatcttgttcaatactctccggaccagtttaaaagttccaacattgcgaagaaagaactcagaaaagaattgatggatctgggctttaaagtccgctatataagcgaaaattacaagatgatggcgatcgaaggtacagccactcttcaggcagtacaccctaaccaaaactggcattataatatgattaaagctccggaagcgtgggctattacgtctggatcctctagcgttaaagtagcagtcctggatacagggatcgaccataatcacccatccttggccaacttcgtgaatactaatcttggccggtcgtttgttggaggaaacaccatggatgttcaaggtcatggcacacatgttgctggcacgattgcatcttatgggagtgtaagcggagtgatgcagagtgcgacactgatcccggtcaaagtgctcgataattctggcagcgggtccctttacggtattacgcaaggcatattgtatgccgccgacatcgatgcggacgtcattaacatgtctctgggtggaggaggctataatcagagcatggatgaggctgttcaaacagcagttgctcagggaaccattgtagtagcagcgactggcaatgatggtgcatcgtcgatcagttatcctgctgcctacagcagcgtcattgcggtgggatctgtgacgtccaatcgtacacgatcctcgttttctaactatggatctgggcttgaagttatggcaccgggcagcaacatctacagtacgtatcctaattccagatatacatctttgagtggtacaagcatggctactccgcacgttgcgggcgtagctgggctcattcgcgcagccaacccagacatatctgtcgcgcaagcccgtcagattctgcgggataccgcgcaagaagcaggatcgttcacacagtacggctatggaatcgtcgatgctcatgccgccgttgttgctgcatccggtggtagcggcggcggaactactcctccgccgccaagcagcacagacacagtaaccacggtctcgacgaactactcttattattatagaggagagacggtgtacatgacatccaccgtcaaagactctaatggcgtggcgatctcgaatgcgacggtgaactttaagataacacgacctaatgggacaagcgtaaccgcaacggctgcgacaaattctagtggagttgccacgtatagtattgggacaaactattccactgcaacaggtacatatcgcgttgatgctaccgcgagcaaaagtggctacactacatcttctgcaagcacgacgtttagagtcagaggccaaactggccaccatcaccatcaccat

SEQ ID NO: 2 - protein, 533 aa, synthetic construct
  REGION 1..533: note = his-tagged wild type serine peptidase from Bacillus sinesaloumensis
MADQASQANGNQDVIEGELIVSVEPKNGKPDVSIQSAQSVTGQEDVLKSKGFTIVDTLHVEDSSVKPLVSKNFNKKVVEKMGLVYLVQYSPDQFKSSNIAKKELRKELMDLGFKVRYISENYKMMAIEGTATLQAVHPNQNWHYNMIKAPEAWAITSGSSSVKVAVLDTGIDHNHPSLANFVNTNLGRSFVGGNTMDVQGHGTHVAGTIASYGSVSGVMQSATLIPVKVLDNSGSGSLYGITQGILYAADIDADVINMSLGGGGYNQSMDEAVQTAVAQGTIVVAATGNDGASSISYPAAYSSVIAVGSVTSNRTRSSFSNYGSGLEVMAPGSNIYSTYPNSRYTSLSGTSMATPHVAGVAGLIRAANPDISVAQARQILRDTAQEAGSFTQYGYGIVDAHAAVVAASGGSGGGTTPPPPSSTDTVTTVSTNYSYYYRGETVYMTSTVKDSNGVAISNATVNFKITRPNGTSVTATAATNSSGVATYSIGTNYSTATGTYRVDATASKSGYTTSSASTTFRVRGQTGHHHHHH

SEQ ID NO: 3 - DNA, 1239 bp, synthetic construct
  misc_feature 1..1239: note = Variant of serine peptidase from Bacillus sinesaloumensis
  source 1..1239: mol_type = other DNA
atggcagatcaagctagtcaagctaatggaaaccaggacgtcattgaaggcgagctgatcgtttcagtggaaccgaagaacggtaaacctgatgtgagcattcaaagtgcacaatccgtaacagggcaggaagacgtccttaaatcgaaaggctttacgatcgttgataccttgcatgtagaggatagcagcgtcaagccactcgtctcgaagaatttcaataagaaagtggtggagaagatgggactggtgtatcttgttcaatactctccggaccagtttaaaagttccaacattgcgaagaaagaactcagaaaagaattgatggatctgggctttaaagtccgctatataagcgaaaattacaagatgatggcgatcgaaggtacagccactcttcaggcagtacaccctaaccaaaactggcattataatatgattaaagctccggaagcgtgggctattacgtctggatcctctagcgttaaagtagcagtcctggatacagggatcgaccataatcacccatccttggccaacttcgtgaatactaatcttggccggtcgtttgttggaggaaacaccatggatgttcaaggtcatggcacacatgttgctggcacgattgcatcttatgggagtgtaagcggagtgatgcagagtgcgacactgatcccggtcaaagtgctcgataattctggcagcgggtccctttacggtattacgcaaggcatattgtatgccgccgacatcgatgcggacgtcattaacatgtctctgggtggaggaggctataatcagagcatggatgaggctgttcaaacagcagttgctcagggaaccattgtagtagcagcgactggcaatgatggtgcatcgtcgatcagttatcctgctgcctacagcagcgtcattgcggtgggatctgtgacgtccaatcgtacacgatcctcgttttctaactatggatctgggcttgaagttatggcaccgggcagcaacatctacagtacgtatcctaattccagatatacatctttgagtggtacaagcatggctactccgcacgttgcgggcgtagctgggctcattcgcgcagccaacccagacatatctgtcgcgcaagcccgtcagattctgcgggataccgcgcaagaagcaggatcgttcacacagtacggctatggaatcgtcgatgctcatgccgccgttgttgctgcatccggtggtagcggcggc

SEQ ID NO: 4 - protein, 413 aa, synthetic construct
  REGION 1..413: note = Variant of serine peptidase from Bacillus sinesaloumensis
MADQASQANGNQDVIEGELIVSVEPKNGKPDVSIQSAQSVTGQEDVLKSKGFTIVDTLHVEDSSVKPLVSKNFNKKVVEKMGLVYLVQYSPDQFKSSNIAKKELRKELMDLGFKVRYISENYKMMAIEGTATLQAVHPNQNWHYNMIKAPEAWAITSGSSSVKVAVLDTGIDHNHPSLANFVNTNLGRSFVGGNTMDVQGHGTHVAGTIASYGSVSGVMQSATLIPVKVLDNSGSGSLYGITQGILYAADIDADVINMSLGGGGYNQSMDEAVQTAVAQGTIVVAATGNDGASSISYPAAYSSVIAVGSVTSNRTRSSFSNYGSGLEVMAPGSNIYSTYPNSRYTSLSGTSMATPHVAGVAGLIRAANPDISVAQARQILRDTAQEAGSFTQYGYGIVDAHAAVVAASGGSGG

SEQ ID NO: 5 - DNA, 1239 bp, synthetic construct
  misc_feature 1..1239: note = Variant of serine peptidase from Bacillus sinesaloumensis
  source 1..1239: mol_type = other DNA
atggcagatcaagctagtcaagctaatggaaaccaggacgtcattgaaggcgagctgatcgtttcagtggaaccgaagaacggtaaacctgatgtgagcattcaaagtgcacaatccgtaacagggcaggaagacgtccttaaatcgaaaggctttacgatcgttgataccttgcatgtagaggatagcagcgtcaagccactcgtctcgaagaatttcaataagaaagtggtggagaagatgggactggtgtatcttgttcaatactctccggaccagtttaaaagttccaacattgcgaagaaagaactcagaaaagaattgatggatctgggctttaaagtccgctatataagcgaaaattacaagatgatggcgatcgaaggtacagccactcttcaggcagtacaccctaaccaaaactggcattataatatgattaaagctccggaagcgtgggctattacgtctggatcctctagcgttaaagtagcagtcctggatacagggatcgaccataatcacccatccttggccaacttcgtgaatacttttcttggccggtcgtttgttggaggaaacaccatggatgttcaaggtcatggcacacatgttgctggcacgattgcatcttatgggagtgtaagcggagtgatgcagagtgcgacactgatcccggtcaaagtgctcgataattctggcagcgggtccctttacggtattacgcaaggcatattgtatgccgccgacatcgatgcggacgtcattaacatgtctctgggtggaggaggctataatcagagcatggatgaggctgttcaaacagcagttgctcagggaaccattgtagtagcagcgactggcaatgatggtgcatcgtcgatcagttatcctgctgcctacagcagcgtcattgcggtgggatctgtgacgtccaatcgtacacgatcctcgttttctaactatggatctgggcttgaagttatggcaccgggcagcaacatctacagtacgtatcctaattccagatatacatctttgagtggtacaagcatggctactccgcacgttgcgggcgtagctgggctcattcgcgcagccaacccagacatatctgtcgcgcaagcccgtcagattctgcgggataccgcgcaagaagcaggatcgttcacacagtacggctatggaatcgtcgatgctcatgccgccgttgttgctgcatccggtggtagcggcggc

SEQ ID NO: 6 - protein, 413 aa, synthetic construct
  REGION 1..413: note = Variant of serine peptidase from Bacillus sinesaloumensis
MADQASQANGNQDVIEGELIVSVEPKNGKPDVSIQSAQSVTGQEDVLKSKGFTIVDTLHVEDSSVKPLVSKNFNKKVVEKMGLVYLVQYSPDQFKSSNIAKKELRKELMDLGFKVRYISENYKMMAIEGTATLQAVHPNQNWHYNMIKAPEAWAITSGSSSVKVAVLDTGIDHNHPSLANFVNTFLGRSFVGGNTMDVQGHGTHVAGTIASYGSVSGVMQSATLIPVKVLDNSGSGSLYGITQGILYAADIDADVINMSLGGGGYNQSMDEAVQTAVAQGTIVVAATGNDGASSISYPAAYSSVIAVGSVTSNRTRSSFSNYGSGLEVMAPGSNIYSTYPNSRYTSLSGTSMATPHVAGVAGLIRAANPDISVAQARQILRDTAQEAGSFTQYGYGIVDAHAAVVAASGGSGG

SEQ ID NO: 7 - DNA, 1239 bp, synthetic construct
  misc_feature 1..1239: note = Variant of serine peptidase from Bacillus sinesaloumensis
  source 1..1239: mol_type = other DNA
atggcagatcaagctagtcaagctaatggaaaccaggacgtcattgaaggcgagctgatcgtttcagtggaaccgaagaacggtaaacctgatgtgagcattcaaagtgcacaatccgtaacagggcaggaagacgtccttaaatcgaaaggctttacgatcgttgataccttgcatgtagaggatagcagcgtcaagccactcgtctcgaagaatttcaataagaaagtggtggagaagatgggactggtgtatcttgttcaatactctccggaccagtttaaaagttccaacattgcgaagaaagaactcagaaaagaattgatggatctgggctttaaagtccgctatataagcgaaaattacaagatgatggcgatcgaaggtacagccactcttattgcagtacaccctaaccaaaactggcattataatatgattaaagctccggaagcgtgggctattacgtctggatcctctagcgttaaagtagcagtcctggatacagggatcgaccataatcacccatccttggccaacttcgtgaatactaatcttggccggtcgtttgttggaggaaacaccatggatgttcaaggtcatggcacacatgttgctggcacgattgcatcttatgggagtgtaagcggagtgatgcagagtgcgacactgatcccggtcaaagtgctcgataattctggcagcgggtccctttacggtattacgcaaggcatattgtatgccgccgacatcgatgcggacgtcattaacatgtctctgggtggaggaggctataatcagagcatggatgaggctgttcaaacagcagttgctcagggaaccattgtagtagcagcgactggcaatgatggtgcatcgtcgatcagttatcctgctgcctacagcagcgtcattgcggtgggatctgtgacgtccaatcgtacacgatcctcgttttctaactatggatctgggcttgaagttatggcaccgggcagcaacatctacagtacgtatcctaattccagatatacatctttgagtggtacaagcatggctactccgcacgttgcgggcgtagctgggctcattcgcgcagccaacccagacatatctgtcgcgcaagcccgtcagattctgcgggataccgcgcaagaagcaggatcgttcacacagtacggctatggaatcgtcgatgctcatgccgccgttgttgctgcatccggtggtagcggcggc

SEQ ID NO: 8 - protein, 413 aa, synthetic construct
  REGION 1..413: note = Variant of serine peptidase from Bacillus sinesaloumensis
MADQASQANGNQDVIEGELIVSVEPKNGKPDVSIQSAQSVTGQEDVLKSKGFTIVDTLHVEDSSVKPLVSKNFNKKVVEKMGLVYLVQYSPDQFKSSNIAKKELRKELMDLGFKVRYISENYKMMAIEGTATLIAVHPNQNWHYNMIKAPEAWAITSGSSSVKVAVLDTGIDHNHPSLANFVNTNLGRSFVGGNTMDVQGHGTHVAGTIASYGSVSGVMQSATLIPVKVLDNSGSGSLYGITQGILYAADIDADVINMSLGGGGYNQSMDEAVQTAVAQGTIVVAATGNDGASSISYPAAYSSVIAVGSVTSNRTRSSFSNYGSGLEVMAPGSNIYSTYPNSRYTSLSGTSMATPHVAGVAGLIRAANPDISVAQARQILRDTAQEAGSFTQYGYGIVDAHAAVVAASGGSGG

SEQ ID NO: 9 - DNA, 1239 bp, synthetic construct
  misc_feature 1..1239: note = Variant of serine peptidase from Bacillus sinesaloumensis
  source 1..1239: mol_type = other DNA
atggcagatcaagctagtcaagctaatggaaaccaggacgtcattgaaggcgagctgatcgtttcagtggaaccgaagaacggtaaacctgatgtgagcattcaaagtgcacaatccgtaacagggcaggaagacgtccttaaatcgaaaggctttacgatcgttgataccttgcatgtagaggatagcagcgtcaagccactcgtctcgaagaatttcaataagaaagtggtggagaagatgggactggtgtatcttgttcaatactctccggaccagtttaaaagttccaacattgcgaagaaagaactcagaaaagaattgatggatctgggctttaaagtccgctatataagcgaaaattacaagatgatggcgatcgaaactacagccactcttcaggcagtacaccctaaccaaaactggcattataatatgattaaagctccggaagcgtgggctattacgtctggatcctctagcgttaaagtagcagtcctggatacagggatcgaccataatcacccatccttggccaacttcgtgaatactaatcttggccggtcgtttgttggaggaaacaccatggatgttcaaggtcatggcacacatgttgctggcacgattgcatcttatgggagtgtaagcggagtgatgcagagtgcgacactgatcccggtcaaagtgctcgataattctggcagcgggtccctttacggtattacgcaaggcatattgtatgccgccgacatcgatgcggacgtcattaacatgtctctgggtggaggaggctataatcagagcatggatgaggctgttcaaacagcagttgctcagggaaccattgtagtagcagcgactggcaatgatggtgcatcgtcgatcagttatcctgctgcctacagcagcgtcattgcggtgggatctgtgacgtccaatcgtacacgatcctcgttttctaactatggatctgggcttgaagttatggcaccgggcagcaacatctacagtacgtatcctaattccagatatacatctttgagtggtacaagcatggctactccgcacgttgcgggcgtagctgggctcattcgcgcagccaacccagacatatctgtcgcgcaagcccgtcagattctgcgggataccgcgcaagaagcaggatcgttcacacagtacggctatggaatcgtcgatgctcatgccgccgttgttgctgcatccggtggtagcggcggc

SEQ ID NO: 10 - protein, 413 aa, synthetic construct
  REGION 1..413: note = Variant of serine peptidase from Bacillus sinesaloumensis
MADQASQANGNQDVIEGELIVSVEPKNGKPDVSIQSAQSVTGQEDVLKSKGFTIVDTLHVEDSSVKPLVSKNFNKKVVEKMGLVYLVQYSPDQFKSSNIAKKELRKELMDLGFKVRYISENYKMMAIETTATLQAVHPNQNWHYNMIKAPEAWAITSGSSSVKVAVLDTGIDHNHPSLANFVNTNLGRSFVGGNTMDVQGHGTHVAGTIASYGSVSGVMQSATLIPVKVLDNSGSGSLYGITQGILYAADIDADVINMSLGGGGYNQSMDEAVQTAVAQGTIVVAATGNDGASSISYPAAYSSVIAVGSVTSNRTRSSFSNYGSGLEVMAPGSNIYSTYPNSRYTSLSGTSMATPHVAGVAGLIRAANPDISVAQARQILRDTAQEAGSFTQYGYGIVDAHAAVVAASGGSGG

SEQ ID NO: 11 - DNA, 1239 bp, synthetic construct
  misc_feature 1..1239: note = Variant of serine peptidase from Bacillus sinesaloumensis
  source 1..1239: mol_type = other DNA
atggcagatcaagctagtcaagctaatggaaaccaggacgtcattgaaggcgagctgatcgtttcagtggaaccgaagaacggtaaacctgatgtgagcattcaaagtgcacaatccgtaacagggcaggaagacgtccttaaatcgaaaggctttacgatcgttgataccttgcatgtagaggatagcagcgtcaagccactcgtctcgaagaatttcaataagaaagtggtggagaagatgggactggtgtatcttgttcaatactctccggaccagtttaaaagttccaacattgcgaagaaagaactcagaaaagaattgatggatctgggctttaaagtccgctatataagcgaaaattacaagatgatggcgatcgaaggtacagccactcttcagtgtgtacaccctaaccaaaactggcattataatatgattaaagctccggaagcgtgggctattacgtctggatcctctagcgttaaagtagcagtcctggatacagggatcgaccataatcacccatccttggccaacttcgtgaatactaatcttggccggtcgtttgttggaggaaacaccatggatgttcaaggtcatggcacacatgttgctggcacgattgcatcttatgggagtgtaagcggagtgatgcagagtgcgacactgatcccggtcaaagtgctcgataattctggcagcgggtccctttacggtattacgcaaggcatattgtatgccgccgacatcgatgcggacgtcattaacatgtctctgggtggaggaggctataatcagagcatggatgaggctgttcaaacagcagttgctcagggaaccattgtagtagcagcgactggcaatgatggtgcatcgtcgatcagttatcctgctgcctacagcagcgtcattgcggtgggatctgtgacgtccaatcgtacacgatcctcgttttctaactatggatctgggcttgaagttatggcaccgggcagcaacatctacagtacgtatcctaattccagatatacatctttgagtggtacaagcatggctactccgcacgttgcgggcgtagctgggctcattcgcgcagccaacccagacatatctgtcgcgcaagcccgtcagattctgcgggataccgcgcaagaagcaggatcgttcacacagtacggctatggaatcgtcgatgctcatgccgccgttgttgctgcatccggtggtagcggcggc

SEQ ID NO: 12 - protein, 413 aa, synthetic construct
  REGION 1..413: note = Variant of serine peptidase from Bacillus sinesaloumensis
MADQASQANGNQDVIEGELIVSVEPKNGKPDVSIQSAQSVTGQEDVLKSKGFTIVDTLHVEDSSVKPLVSKNFNKKVVEKMGLVYLVQYSPDQFKSSNIAKKELRKELMDLGFKVRYISENYKMMAIEGTATLQCVHPNQNWHYNMIKAPEAWAITSGSSSVKVAVLDTGIDHNHPSLANFVNTNLGRSFVGGNTMDVQGHGTHVAGTIASYGSVSGVMQSATLIPVKVLDNSGSGSLYGITQGILYAADIDADVINMSLGGGGYNQSMDEAVQTAVAQGTIVVAATGNDGASSISYPAAYSSVIAVGSVTSNRTRSSFSNYGSGLEVMAPGSNIYSTYPNSRYTSLSGTSMATPHVAGVAGLIRAANPDISVAQARQILRDTAQEAGSFTQYGYGIVDAHAAVVAASGGSGG

SEQ ID NO: 13 - DNA, 1239 bp, synthetic construct
  misc_feature 1..1239: note = Variant of serine peptidase from Bacillus sinesaloumensis
  source 1..1239: mol_type = other DNA
atggcagatcaagctagtcaagctaatggaaaccaggacgtcattgaaggcgagctgatcgtttcagtggaaccgaagaacggtaaacctgatgtgagcattcaaagtgcacaatccgtaacagggcaggaagacgtccttaaatcgaaaggctttacgatcgttgataccttgcatgtagaggatagcagcgtcaagccactcgtctcgaagaatttcaataagaaagtggtggagaagatgggactggtgtatcttgttcaatactctccggaccagtttaaaagttccaacattgcgaagaaagaactcagaaaagaattgatggatctgggctttaaagtccgctatataagcgaaaattacaagatgatggcgatcgaaggtacagccactcttcaggcagtacaccctaaccaaaactggcattataatatgattaaagctccggaagcgtgggctattacgtctggatcctctagcgttaaagtagcagtcctggatacagggatcgaccataatcacccatccttggccaacttcgtgaatgcgaatcttggccggtcgtttgttggaggaaacaccatggatgttcaaggtcatggcacacatgttgctggcacgattgcatcttatgggagtgtaagcggagtgatgcagagtgcgacactgatcccggtcaaagtgctcgataattctggcagcgggtccctttacggtattacgcaaggcatattgtatgccgccgacatcgatgcggacgtcattaacatgtctctgggtggaggaggctataatcagagcatggatgaggctgttcaaacagcagttgctcagggaaccattgtagtagcagcgactggcaatgatggtgcatcgtcgatcagttatcctgctgcctacagcagcgtcattgcggtgggatctgtgacgtccaatcgtacacgatcctcgttttctaactatggatctgggcttgaagttatggcaccgggcagcaacatctacagtacgtatcctaattccagatatacatctttgagtggtacaagcatggctactccgcacgttgcgggcgtagctgggctcattcgcgcagccaacccagacatatctgtcgcgcaagcccgtcagattctgcgggataccgcgcaagaagcaggatcgttcacacagtacggctatggaatcgtcgatgctcatgccgccgttgttgctgcatccggtggtagcggcggc

SEQ ID NO: 14 - protein, 413 aa, synthetic construct
  REGION 1..413: note = Variant of serine peptidase from Bacillus sinesaloumensis
MADQASQANGNQDVIEGELIVSVEPKNGKPDVSIQSAQSVTGQEDVLKSKGFTIVDTLHVEDSSVKPLVSKNFNKKVVEKMGLVYLVQYSPDQFKSSNIAKKELRKELMDLGFKVRYISENYKMMAIEGTATLQAVHPNQNWHYNMIKAPEAWAITSGSSSVKVAVLDTGIDHNHPSLANFVNANLGRSFVGGNTMDVQGHGTHVAGTIASYGSVSGVMQSATLIPVKVLDNSGSGSLYGITQGILYAADIDADVINMSLGGGGYNQSMDEAVQTAVAQGTIVVAATGNDGASSISYPAAYSSVIAVGSVTSNRTRSSFSNYGSGLEVMAPGSNIYSTYPNSRYTSLSGTSMATPHVAGVAGLIRAANPDISVAQARQILRDTAQEAGSFTQYGYGIVDAHAAVVAASGGSGG

SEQ ID NO: 15 - DNA, 1239 bp, synthetic construct
  misc_feature 1..1239: note = Variant of serine peptidase from Bacillus sinesaloumensis
  source 1..1239: mol_type = other DNA
atggcagatcaagctagtcaagctaatggaaaccaggacgtcattgaaggcgagctgatcgtttcagtggaaccgaagaacggtaaacctgatgtgagcattcaaagtgcacaatccgtaacagggcaggaagacgtccttaaatcgaaaggctttacgatcgttgataccttgcatgtagaggatagcagcgtcaagccactcgtctcgaagaatttcaataagaaagtggtggagaagatgggactggtgtatcttgttcaatactctccggaccagtttaaaagttccaacattgcgaagaaagaactcagaaaagaattgatggatctgggctttaaagtccgctatataagcgaaaattacaagatgatggcgatcgaaaggacagccactcttcaggcagtacaccctaaccaaaactggcattataatatgattaaagctccggaagcgtgggctattacgtctggatcctctagcgttaaagtagcagtcctggatacagggatcgaccataatcacccatccttggccaacttcgtgaatactaatcttggccggtcgtttgttggaggaaacaccatggatgttcaaggtcatggcacacatgttgctggcacgattgcatcttatgggagtgtaagcggagtgatgcagagtgcgacactgatcccggtcaaagtgctcgataattctggcagcgggtccctttacggtattacgcaaggcatattgtatgccgccgacatcgatgcggacgtcattaacatgtctctgggtggaggaggctataatcagagcatggatgaggctgttcaaacagcagttgctcagggaaccattgtagtagcagcgactggcaatgatggtgcatcgtcgatcagttatcctgctgcctacagcagcgtcattgcggtgggatctgtgacgtccaatcgtacacgatcctcgttttctaactatggatctgggcttgaagttatggcaccgggcagcaacatctacagtacgtatcctaattccagatatacatctttgagtggtacaagcatggctactccgcacgttgcgggcgtagctgggctcattcgcgcagccaacccagacatatctgtcgcgcaagcccgtcagattctgcgggataccgcgcaagaagcaggatcgttcacacagtacggctatggaatcgtcgatgctcatgccgccgttgttgctgcatccggtggtagcggcggc

SEQ ID NO: 16 - protein, 413 aa, synthetic construct
  REGION 1..413: note = Variant of serine peptidase from Bacillus sinesaloumensis
MADQASQANGNQDVIEGELIVSVEPKNGKPDVSIQSAQSVTGQEDVLKSKGFTIVDTLHVEDSSVKPLVSKNFNKKVVEKMGLVYLVQYSPDQFKSSNIAKKELRKELMDLGFKVRYISENYKMMAIERTATLQAVHPNQNWHYNMIKAPEAWAITSGSSSVKVAVLDTGIDHNHPSLANFVNTNLGRSFVGGNTMDVQGHGTHVAGTIASYGSVSGVMQSATLIPVKVLDNSGSGSLYGITQGILYAADIDADVINMSLGGGGYNQSMDEAVQTAVAQGTIVVAATGNDGASSISYPAAYSSVIAVGSVTSNRTRSSFSNYGSGLEVMAPGSNIYSTYPNSRYTSLSGTSMATPHVAGVAGLIRAANPDISVAQARQILRDTAQEAGSFTQYGYGIVDAHAAVVAASGGSGG

SEQ ID NO: 17 - DNA, 1239 bp, synthetic construct
  misc_feature 1..1239: note = Variant of serine peptidase from Bacillus sinesaloumensis
  source 1..1239: mol_type = other DNA
atggcagatcaagctagtcaagctaatggaaaccaggacgtcattgaaggcgagctgatcgtttcagtggaaccgaagaacggtaaacctgatgtgagcattcaaagtgcacaatccgtaacagggcaggaagacgtccttaaatcgaaaggctttacgatcgttgataccttgcatgtagaggatagcagcgtcaagccactcgtctcgaagaatttcaataagaaagtggtggagaagatgggactggtgtatcttgttcaatactctccggaccagtttaaaagttccaacattgcgaagaaagaactcagaaaagaattgatggatctgggctttaaagtccgctatataagcgaaaattacaagatgatggcgatcgaaggtacagcctatcttcaggcagtacaccctaaccaaaactggcattataatatgattaaagctccggaagcgtgggctattacgtctggatcctctagcgttaaagtagcagtcctggatacagggatcgaccataatcacccatccttggccaacttcgtgaatactaatcttggccggtcgtttgttggaggaaacaccatggatgttcaaggtcatggcacacatgttgctggcacgattgcatcttatgggagtgtaagcggagtgatgcagagtgcgacactgatcccggtcaaagtgctcgataattctggcagcgggtccctttacggtattacgcaaggcatattgtatgccgccgacatcgatgcggacgtcattaacatgtctctgggtggaggaggctataatcagagcatggatgaggctgttcaaacagcagttgctcagggaaccattgtagtagcagcgactggcaatgatggtgcatcgtcgatcagttatcctgctgcctacagcagcgtcattgcggtgggatctgtgacgtccaatcgtacacgatcctcgttttctaactatggatctgggcttgaagttatggcaccgggcagcaacatctacagtacgtatcctaattccagatatacatctttgagtggtacaagcatggctactccgcacgttgcgggcgtagctgggctcattcgcgcagccaacccagacatatctgtcgcgcaagcccgtcagattctgcgggataccgcgcaagaagcaggatcgttcacacagtacggctatggaatcgtcgatgctcatgccgccgttgttgctgcatccggtggtagcggcggc

SEQ ID NO: 18 - protein, 413 aa, synthetic construct
  REGION 1..413: note = Variant of serine peptidase from Bacillus sinesaloumensis
MADQASQANGNQDVIEGELIVSVEPKNGKPDVSIQSAQSVTGQEDVLKSKGFTIVDTLHVEDSSVKPLVSKNFNKKVVEKMGLVYLVQYSPDQFKSSNIAKKELRKELMDLGFKVRYISENYKMMAIEGTAYLQAVHPNQNWHYNMIKAPEAWAITSGSSSVKVAVLDTGIDHNHPSLANFVNTNLGRSFVGGNTMDVQGHGTHVAGTIASYGSVSGVMQSATLIPVKVLDNSGSGSLYGITQGILYAADIDADVINMSLGGGGYNQSMDEAVQTAVAQGTIVVAATGNDGASSISYPAAYSSVIAVGSVTSNRTRSSFSNYGSGLEVMAPGSNIYSTYPNSRYTSLSGTSMATPHVAGVAGLIRAANPDISVAQARQILRDTAQEAGSFTQYGYGIVDAHAAVVAASGGSGG

SEQ ID NO: 19 - DNA, 1239 bp, synthetic construct
  misc_feature 1..1239: note = Variant of serine peptidase from Bacillus sinesaloumensis
  source 1..1239: mol_type = other DNA
atggcagatcaagctagtcaagctaatggaaaccaggacgtcattgaaggcgagctgatcgtttcagtggaaccgaagaacggtaaacctgatgtgagcattcaaagtgcacaatccgtaacagggcaggaagacgtccttaaatcgaaaggctttacgatcgttgataccttgcatgtagaggatagcagcgtcaagccactcgtctcgaagaatttcaataagaaagtggtggagaagatgggactggtgtatcttgttcaatactctccggaccagtttaaaagttccaacattgcgaagaaagaactcagaaaagaattgatggatctgggctttaaagtccgctatataagcgaaaattacaagatgatggcgatcgaaggtacagccactcttcaggcagtacaccctaaccaaaactggcattataatatgattaaagctccggaagcgtgggctattacgtctggatcctctagcgttaaagtagcagtcctggatacagggatcgaccataatcacccatccttggccaacttcgtgaatactaatcggggccggtcgtttgttggaggaaacaccatggatgttcaaggtcatggcacacatgttgctggcacgattgcatcttatgggagtgtaagcggagtgatgcagagtgcgacactgatcccggtcaaagtgctcgataattctggcagcgggtccctttacggtattacgcaaggcatattgtatgccgccgacatcgatgcggacgtcattaacatgtctctgggtggaggaggctataatcagagcatggatgaggctgttcaaacagcagttgctcagggaaccattgtagtagcagcgactggcaatgatggtgcatcgtcgatcagttatcctgctgcctacagcagcgtcattgcggtgggatctgtgacgtccaatcgtacacgatcctcgttttctaactatggatctgggcttgaagttatggcaccgggcagcaacatctacagtacgtatcctaattccagatatacatctttgagtggtacaagcatggctactccgcacgttgcgggcgtagctgggctcattcgcgcagccaacccagacatatctgtcgcgcaagcccgtcagattctgcgggataccgcgcaagaagcaggatcgttcacacagtacggctatggaatcgtcgatgctcatgccgccgttgttgctgcatccggtggtagcggcggc

SEQ ID NO: 20 - protein, 413 aa, synthetic construct
  REGION 1..413: note = Variant of serine peptidase from Bacillus sinesaloumensis
MADQASQANGNQDVIEGELIVSVEPKNGKPDVSIQSAQSVTGQEDVLKSKGFTIVDTLHVEDSSVKPLVSKNFNKKVVEKMGLVYLVQYSPDQFKSSNIAKKELRKELMDLGFKVRYISENYKMMAIEGTATLQAVHPNQNWHYNMIKAPEAWAITSGSSSVKVAVLDTGIDHNHPSLANFVNTNRGRSFVGGNTMDVQGHGTHVAGTIASYGSVSGVMQSATLIPVKVLDNSGSGSLYGITQGILYAADIDADVINMSLGGGGYNQSMDEAVQTAVAQGTIVVAATGNDGASSISYPAAYSSVIAVGSVTSNRTRSSFSNYGSGLEVMAPGSNIYSTYPNSRYTSLSGTSMATPHVAGVAGLIRAANPDISVAQARQILRDTAQEAGSFTQYGYGIVDAHAAVVAASGGSGG

SEQ ID NO: 21 - DNA, 1239 bp, synthetic construct
  misc_feature 1..1239: note = Variant of serine peptidase from Bacillus sinesaloumensis
  source 1..1239: mol_type = other DNA
atggcagatcaagctagtcaagctaatggaaaccaggacgtcattgaaggcgagctgatcgtttcagtggaaccgaagaacggtaaacctgatgtgagcattcaaagtgcacaatccgtaacagggcaggaagacgtccttaaatcgaaaggctttacgatcgttgataccttgcatgtagaggatagcagcgtcaagccactcgtctcgaagaatttcaataagaaagtggtggagaagatgggactggtgtatcttgttcaatactctccggaccagtttaaaagttccaacattgcgaagaaagaactcagaaaagaattgatggatctgggctttaaagtccgctatataagcgaaaattacaagatgatggcgatcgaaggtacagccactcttcaggcagtacaccctaaccaaaactggcattataatatgattaaagctccggaagcgtgggctattacgtctggatcctctagcgttaaagtagcagtcctggatacagggatcgaccataatcacccatccttggccaacttcgtgaatactaatcttggccggtcgtttgttggaacgaacaccatggatgttcaaggtcatggcacacatgttgctggcacgattgcatcttatgggagtgtaagcggagtgatgcagagtgcgacactgatcccggtcaaagtgctcgataattctggcagcgggtccctttacggtattacgcaaggcatattgtatgccgccgacatcgatgcggacgtcattaacatgtctctgggtggaggaggctataatcagagcatggatgaggctgttcaaacagcagttgctcagggaaccattgtagtagcagcgactggcaatgatggtgcatcgtcgatcagttatcctgctgcctacagcagcgtcattgcggtgggatctgtgacgtccaatcgtacacgatcctcgttttctaactatggatctgggcttgaagttatggcaccgggcagcaacatctacagtacgtatcctaattccagatatacatctttgagtggtacaagcatggctactccgcacgttgcgggcgtagctgggctcattcgcgcagccaacccagacatatctgtcgcgcaagcccgtcagattctgcgggataccgcgcaagaagcaggatcgttcacacagtacggctatggaatcgtcgatgctcatgccgccgttgttgctgcatccggtggtagcggcggc

SEQ ID NO: 22 - protein, 413 aa, synthetic construct
  REGION 1..413: note = Variant of serine peptidase from Bacillus sinesaloumensis
MADQASQANGNQDVIEGELIVSVEPKNGKPDVSIQSAQSVTGQEDVLKSKGFTIVDTLHVEDSSVKPLVSKNFNKKVVEKMGLVYLVQYSPDQFKSSNIAKKELRKELMDLGFKVRYISENYKMMAIEGTATLQAVHPNQNWHYNMIKAPEAWAITSGSSSVKVAVLDTGIDHNHPSLANFVNTNLGRSFVGTNTMDVQGHGTHVAGTIASYGSVSGVMQSATLIPVKVLDNSGSGSLYGITQGILYAADIDADVINMSLGGGGYNQSMDEAVQTAVAQGTIVVAATGNDGASSISYPAAYSSVIAVGSVTSNRTRSSFSNYGSGLEVMAPGSNIYSTYPNSRYTSLSGTSMATPHVAGVAGLIRAANPDISVAQARQILRDTAQEAGSFTQYGYGIVDAHAAVVAASGGSGG

SEQ ID NO: 23 - DNA, 1239 bp, synthetic construct
  misc_feature 1..1239: note = Variant of serine peptidase from Bacillus sinesaloumensis
  source 1..1239: mol_type = other DNA
atggcagatcaagctagtcaagctaatggaaaccaggacgtcattgaaggcgagctgatcgtttcagtggaaccgaagaacggtaaacctgatgtgagcattcaaagtgcacaatccgtaacagggcaggaagacgtccttaaatcgaaaggctttacgatcgttgataccttgcatgtagaggatagcagcgtcaagccactcgtctcgaagaatttcaataagaaagtggtggagaagatgggactggtgtatcttgttcaatactctccggaccagtttaaaagttccaacattgcgaagaaagaactcagaaaagaattgatggatctgggctttaaagtccgctatataagcgaaaattacaagatgatggcgatcgaaggtacagccactcttcaggcagtacaccctaaccaaaactggcattataatatgattaaagctccggaagcgtgggctattacgtctggatcctctagcgttaaagtagcagtcctggatacagggatcgaccataatcacccatccttggccaacttcgtgaatactaatcttggccggtcgtttgttggaggaaacaccatggatgttcaaggtcatggcacacatgttgctggcacgattgcatcttatgggagtgtaagcggagtgatgcagagtgcgacactgatcccggtcaaagtgctcgataattctggcagcgggtccctttacggtattacgcaaggcatattgtatgccgccgacatcgatgcggacgtcattaacatgtctctgggtggaccgggctataatcagagcatggatgaggctgttcaaacagcagttgctcagggaaccattgtagtagcagcgactggcaatgatggtgcatcgtcgatcagttatcctgctgcctacagcagcgtcattgcggtgggatctgtgacgtccaatcgtacacgatcctcgttttctaactatggatctgggcttgaagttatggcaccgggcagcaacatctacagtacgtatcctaattccagatatacatctttgagtggtacaagcatggctactccgcacgttgcgggcgtagctgggctcattcgcgcagccaacccagacatatctgtcgcgcaagcccgtcagattctgcgggataccgcgcaagaagcaggatcgttcacacagtacggctatggaatcgtcgatgctcatgccgccgttgttgctgcatccggtggtagcggcggc

SEQ ID NO: 24 - protein, 413 aa, synthetic construct
  REGION 1..413: note = Variant of serine peptidase from Bacillus sinesaloumensis
MADQASQANGNQDVIEGELIVSVEPKNGKPDVSIQSAQSVTGQEDVLKSKGFTIVDTLHVEDSSVKPLVSKNFNKKVVEKMGLVYLVQYSPDQFKSSNIAKKELRKELMDLGFKVRYISENYKMMAIEGTATLQAVHPNQNWHYNMIKAPEAWAITSGSSSVKVAVLDTGIDHNHPSLANFVNTNLGRSFVGGNTMDVQGHGTHVAGTIASYGSVSGVMQSATLIPVKVLDNSGSGSLYGITQGILYAADIDADVINMSLGGPGYNQSMDEAVQTAVAQGTIVVAATGNDGASSISYPAAYSSVIAVGSVTSNRTRSSFSNYGSGLEVMAPGSNIYSTYPNSRYTSLSGTSMATPHVAGVAGLIRAANPDISVAQARQILRDTAQEAGSFTQYGYGIVDAHAAVVAASGGSGG

SEQ ID NO: 25 - DNA, 1239 bp, synthetic construct
  misc_feature 1..1239: note = Variant of serine peptidase from Bacillus sinesaloumensis
  source 1..1239: mol_type = other DNA
atggcagatcaagctagtcaagctaatggaaaccaggacgtcattgaaggcgagctgatcgtttcagtggaaccgaagaacggtaaacctgatgtgagcattcaaagtgcacaatccgtaacagggcaggaagacgtccttaaatcgaaaggctttacgatcgttgataccttgcatgtagaggatagcagcgtcaagccactcgtctcgaagaatttcaataagaaagtggtggagaagatgggactggtgtatcttgttcaatactctccggaccagtttaaaagttccaacattgcgaagaaagaactcagaaaagaattgatggatctgggctttaaagtccgctatataagcgaaaattacaagatgatggcgatcgaaggtacagccactcttcaggcagtacaccctaaccaaaactggcattataatatgattaaagctccggaagcgtgggctattacgtctggatcctctagcgttaaagtagcagtcctggatacagggatcgaccataatcacccatccttggccaacttcgtgaatactaatcttggccggtcgtttgttggaggaaacaccatggatgttcaaggtcatggcacacatgttgctggcacgattgcatcttatgggagtgtaagcggagtgatgcagagtgcgacactgatcccggtcaaagtgctcgataattctggcagcgggtccctttacggtattacgcaaggcatattgtatgccgccgacatcgatgcggacgtcattaacatgtctctgggtggaggaggctataatcagagcatggatgaggctgttcaaacagcagttgctcagggaaccattgtagtagcagcgactggcaatgatggtgcatcgtcgatcagttatcctgctgcctacagcagcgtcattgcggtgggatctgtgacgtccaatcgtacacgatcctcgttttctaactatggatctgggcttgaagttatggcaccgggcagcaacatctacagtacgtatcctaattccagatatacatctttgagtggtacaagcatggctactccgcacgttgcgggcgtagctgggctcattcgcgcagccaacccatgtatatctgtcgcgcaagcccgtcagattctgcgggataccgcgcaagaagcaggatcgttcacacagtacggctatggaatcgtcgatgctcatgccgccgttgttgctgcatccggtggtagcggcggc

SEQ ID NO: 26 - protein, 413 aa, synthetic construct
  REGION 1..413: note = Variant of serine peptidase from Bacillus sinesaloumensis
MADQASQANGNQDVIEGELIVSVEPKNGKPDVSIQSAQSVTGQEDVLKSKGFTIVDTLHVEDSSVKPLVSKNFNKKVVEKMGLVYLVQYSPDQFKSSNIAKKELRKELMDLGFKVRYISENYKMMAIEGTATLQAVHPNQNWHYNMIKAPEAWAITSGSSSVKVAVLDTGIDHNHPSLANFVNTNLGRSFVGGNTMDVQGHGTHVAGTIASYGSVSGVMQSATLIPVKVLDNSGSGSLYGITQGILYAADIDADVINMSLGGGGYNQSMDEAVQTAVAQGTIVVAATGNDGASSISYPAAYSSVIAVGSVTSNRTRSSFSNYGSGLEVMAPGSNIYSTYPNSRYTSLSGTSMATPHVAGVAGLIRAANPCISVAQARQILRDTAQEAGSFTQYGYGIVDAHAAVVAASGGSGG

SEQ ID NO: 27 - DNA, 1239 bp, synthetic construct
  misc_feature 1..1239: note = Variant of serine peptidase from Bacillus sinesaloumensis
  source 1..1239: mol_type = other DNA
atggcagatcaagctagtcaagctaatggaaaccaggacgtcattgaaggcgagctgatcgtttcagtggaaccgaagaacggtaaacctgatgtgagcattcaaagtgcacaatccgtaacagggcaggaatacgtccttaaatcgaaaggctttacgatcgttgataccttgcatgtagaggatagcagcgtcaagccactcgtctcgaagaatttcaataagaaagtggtggagaagatgggactggtgtatcttgttcaatactctccggaccagtttaaaagttccaacattgcgaagaaagaactcagaaaagaattgatggatctgggctttaaagtccgctatataagcgaaaattacaagatgatggcgatcgaaggtacagccactctttgggcagtacaccctaaccaaaactggcattataatatgattaaagctccggaagcgtgggctattacgtctggatcctctagcgttaaagtagcagtcctggatacagggatcgaccataatcacccatccttggccaacttcgtgaatactaatcttggccggtcgtttgttggaggaaacaccatggatgttcaaggtcatggcacacatgttgctggcacgattgcatcttatgggagtgtaagcggagtgatgcagagtgcgacactgatcccggtcaaagtgctcgataattctggcagcgggtccctttacggtattacgcaaggcatattgtatgccgccgacatcgatgcggacgtcattaacatgtctctgggtggaggaggctataatcagagcatggatgaggctgttcaaacagcagttgctcagggaaccattgtagtagcagcgactggcaatgatggtgcatcgtcgatcagttatcctgctgcctacagcagcgtcattgcggtgggatctgtgacgtccaatcgtacacgatcctcgttttctaactatggatctgggcttgaagttatggcaccgggcagcaacatctacagtacgtatcctaattccagatatacatctttgagtggtacaagcatggctactccgcacgttgcgggcgtagctgggctcattcgcgcagccaacccagacatatctgtcgcgcaagcccgtcagattctgcgggataccgcgcaagaagcaggatcgttcacacagtacggctatggaatcgtcgatgctcatgccgccgttgttgctgcatccggtggtagcggcggc

SEQ ID NO: 28 - protein, 413 aa, synthetic construct
  REGION 1..413: note = Variant of serine peptidase from Bacillus sinesaloumensis
MADQASQANGNQDVIEGELIVSVEPKNGKPDVSIQSAQSVTGQEYVLKSKGFTIVDTLHVEDSSVKPLVSKNFNKKVVEKMGLVYLVQYSPDQFKSSNIAKKELRKELMDLGFKVRYISENYKMMAIEGTATLWAVHPNQNWHYNMIKAPEAWAITSGSSSVKVAVLDTGIDHNHPSLANFVNTNLGRSFVGGNTMDVQGHGTHVAGTIASYGSVSGVMQSATLIPVKVLDNSGSGSLYGITQGILYAADIDADVINMSLGGGGYNQSMDEAVQTAVAQGTIVVAATGNDGASSISYPAAYSSVIAVGSVTSNRTRSSFSNYGSGLEVMAPGSNIYSTYPNSRYTSLSGTSMATPHVAGVAGLIRAANPDISVAQARQILRDTAQEAGSFTQYGYGIVDAHAAVVAASGGSGG

SEQ ID NO: 29 - DNA, 1239 bp, synthetic construct
  misc_feature 1..1239: note = Variant of serine peptidase from Bacillus sinesaloumensis
  source 1..1239: mol_type = other DNA
atggcagatcaagctagtcaagctaatggaaaccaggacgtcattgaaggcgagctgatcgtttcagtggaaccgaagaacggtaaacctgatgtgagcattcaaagtgcacaatccgtaacagggcaggaagacgtccttaaatcgaaaggctttacgatcgttgataccttgcatgtagaggatagcagcgtcaagccactcgtctcgaagaatttcaataagaaagtggtggagaagatgggactggtgtatcttgttcaatactctccggaccagtttaaaagttccaacattgcgaagaaagaactcagaaaagaattgatggatctgggctttaaagtccgctatataagcgaaaattacaagatgatggcgatcgaaggtacagccactcttcaggcagtacaccctaaccaaaactggcattataatatgattaaagctccggaagcgtgggctattacgtctggatcctctagcgttaaagtagcagtcctggatacagggatcgaccataatcacccatccttggccaacttcgtgaatactatgcttggccggtcgtttgttggaggaaacaccatggatgttcaaggtcatggcacacatgttgctggcacgattgcatcttatgggagtgtaagcggagtgatgcagagtgcgacactgatcccggtcaaagtgctcgataattctggcagcgggtccctttacggtattacgcaaggcatattgtatgccgccgacatcgatgcggacgtcattaacatgtctctgggtggaggaggctataatcagagcatggatgaggctgttcaaacagcagttgctcagggaaccattgtagtagcagcgactggcaatgatggtgcatcgtcgatcagttatcctgctgcctacagcagcgtcattgcggtgggatctgtgacgtccaatcgtacacgatcctcgttttctaactatggatctgggcttgaagttatggcaccgggcagcaacatctacagtacgtatcctaattccagatatacatctttgagtggtacaagcatggctactccgcacgttgcgggcgtagctgggctcattcgcgcagccaacccagacatatctgtcgcgcaagcccgtcagattctgcgggataccgcgcaagaagcaggatcgttcacacagtacggctatggaatcgtcgatgctcatgccgccgttgttgctgcatccggtggtagcggcggc

SEQ ID NO: 30 - protein, 413 aa, synthetic construct
  REGION 1..413: note = Variant of serine peptidase from Bacillus sinesaloumensis
MADQASQANGNQDVIEGELIVSVEPKNGKPDVSIQSAQSVTGQEDVLKSKGFTIVDTLHVEDSSVKPLVSKNFNKKVVEKMGLVYLVQYSPDQFKSSNIAKKELRKELMDLGFKVRYISENYKMMAIEGTATLQAVHPNQNWHYNMIKAPEAWAITSGSSSVKVAVLDTGIDHNHPSLANFVNTMLGRSFVGGNTMDVQGHGTHVAGTIASYGSVSGVMQSATLIPVKVLDNSGSGSLYGITQGILYAADIDADVINMSLGGGGYNQSMDEAVQTAVAQGTIVVAATGNDGASSISYPAAYSSVIAVGSVTSNRTRSSFSNYGSGLEVMAPGSNIYSTYPNSRYTSLSGTSMATPHVAGVAGLIRAANPDISVAQARQILRDTAQEAGSFTQYGYGIVDAHAAVVAASGGSGG

SEQ ID NO: 31 - DNA, 1239 bp, synthetic construct
  misc_feature 1..1239: note = Variant of serine peptidase from Bacillus sinesaloumensis
  source 1..1239: mol_type = other DNA
atggcagatcaagctagtcaagctaatggaaaccaggacgtcattgaaggcgagctgatcgtttcagtggaaccgaagaacggtaaacctgatgtgagcattcaaagtgcacaatccgtaacagggcaggaagacgtccttaaatcgaaaggctttacgatcgttgataccttgcatgtagaggatagcagcgtcaagccactcgtctcgaagaatttcaataagaaagtggtggagaagatgggactggtgtatcttgttcaatactctccggaccagtttaaaagttccaacattgcgaagaaagaactcagaaaagaattgatggatctgggctttaaagtccgctatataagcgaaaattacaagatgatggcgatcgaaggtacagccactcttcaggcagtacaccctaaccaaaactggcattataatatgattaaagctccggaagcgtgggctattacgtctggatcctctagcgttaaagtagcagtcctggatacagggatcgaccataatcacccatccttggccaacttcgtgaatactaatcttggccggtcgtttgttggaggaaacaccatggatgttaagggtcatggcacacatgttgctggcacgattgcatcttatgggagtgtaagcggagtgatgcagagtgcgacactgatcccggtcaaagtgctcgataattctggcagcgggtccctttacggtattacgcaaggcatattgtatgccgccgacatcgatgcggacgtcattaacatgtctctgggtggaggaggctataatcagagcatggatgaggctgttcaaacagcagttgctcagggaaccattgtagtagcagcgactggcaatgatggtgcatcgtcgatcagttatcctgctgcctacagcagcgtcattgcggtgggatctgtgacgtccaatcgtacacgatcctcgttttctaactatggatctgggcttgaagttatggcaccgggcagcaacatctacagtacgtatcctaattccagatatacatctttgagtggtacaagcatggctactccgcacgttgcgggcgtagctgggctcattcgcgcagccaacccagacatatctgtcgcgcaagcccgtcagattctgcgggataccgcgcaagaagcaggatcgttcacacagtacggctatggaatcgtcgatgctcatgccgccgttgttgctgcatccggtggtagcggcggc

SEQ ID NO: 32 - protein, 413 aa, synthetic construct
  REGION 1..413: note = Variant of serine peptidase from Bacillus sinesaloumensis
MADQASQANGNQDVIEGELIVSVEPKNGKPDVSIQSAQSVTGQEDVLKSKGFTIVDTLHVEDSSVKPLVSKNFNKKVVEKMGLVYLVQYSPDQFKSSNIAKKELRKELMDLGFKVRYISENYKMMAIEGTATLQAVHPNQNWHYNMIKAPEAWAITSGSSSVKVAVLDTGIDHNHPSLANFVNTNLGRSFVGGNTMDVKGHGTHVAGTIASYGSVSGVMQSATLIPVKVLDNSGSGSLYGITQGILYAADIDADVINMSLGGGGYNQSMDEAVQTAVAQGTIVVAATGNDGASSISYPAAYSSVIAVGSVTSNRTRSSFSNYGSGLEVMAPGSNIYSTYPNSRYTSLSGTSMATPHVAGVAGLIRAANPDISVAQARQILRDTAQEAGSFTQYGYGIVDAHAAVVAASGGSGG

SEQ ID NO: 33 - DNA, 1239 bp, synthetic construct
  misc_feature 1..1239: note = Variant of serine peptidase from Bacillus sinesaloumensis
  source 1..1239: mol_type = other DNA
atggcagatcaagctagtcaagctaatggaaaccaggacgtcattgaaggcgagctgatcgtttcagtggaaccgaagaacggtaaacctgatgtgagcattcaaagtgcacaatccgtaacagggcaggaagacgtccttaaatcgaaaggctttacgatcgttgataccttgcatgtagaggatagcagcgtcaagccactcgtctcgaagaatttcaataagaaagtggtggagaagatgggactggtgtatcttgttcaatactctccggaccagtttaaaagttccaacattgcgaagaaagaactcagaaaagaattgatggatctgggctttaaagtccgctatataagcgaaaattacaagatgatggcgatcgaaggtacagccactcttcaggcagtacaccctaaccaaaactggcattataatatgattaaagctccggaagcgtgggctattacgtctggatcctctagcgttaaagtagcagtcctggatacagggatcgaccataatcacccatccttggccaacttcgtgaatactaatcttggccggtcgtttgttggaggaaacaccatggatgttcaaggtcatggcacacatgttgctggcacgattgcatcttatgggagtgtaagcggagtgatgcagagtgcgacactgatcccggtcaaagtgctcgataattctggcagcgggtccctttacggtattacgcaaggcatattgtatgccgccgacatcgatgcggacgtcattaacatgtctctgggtggaggaggctataatcagagcatggatgaggctgttcaaacagcagttgctcagggaaccattgtagtagcagcgactggcaatgatggtgcatcgtcgatcagttatcctgctgcctacagcagcgtcattgcggtgggatctgtgacgtccaatcgtacacgatcctcgttttctaactatggatctgggcttgaagttatggcaccgggcagcaacatctacagtacgtatcctaattccagatatacatctttgagtggtacaagcatggctactccgcacgttgcgggcgtagctgggctcattcgcgcagccacgccagacatatctgtcgcgcaagcccgtcagattctgcgggataccgcgcaagaagcaggatcgttcacacagtacggctatggaatcgtcgatgctcatgccgccgttgttgctgcatccggtggtagcggcggc

SEQ ID NO: 34 - protein, 413 aa, synthetic construct
  REGION 1..413: note = Variant of serine peptidase from Bacillus sinesaloumensis
MADQASQANGNQDVIEGELIVSVEPKNGKPDVSIQSAQSVTGQEDVLKSKGFTIVDTLHVEDSSVKPLVSKNFNKKVVEKMGLVYLVQYSPDQFKSSNIAKKELRKELMDLGFKVRYISENYKMMAIEGTATLQAVHPNQNWHYNMIKAPEAWAITSGSSSVKVAVLDTGIDHNHPSLANFVNTNLGRSFVGGNTMDVQGHGTHVAGTIASYGSVSGVMQSATLIPVKVLDNSGSGSLYGITQGILYAADIDADVINMSLGGGGYNQSMDEAVQTAVAQGTIVVAATGNDGASSISYPAAYSSVIAVGSVTSNRTRSSFSNYGSGLEVMAPGSNIYSTYPNSRYTSLSGTSMATPHVAGVAGLIRAATPDISVAQARQILRDTAQEAGSFTQYGYGIVDAHAAVVAASGGSGG

SEQ ID NO: 35 - DNA, 1239 bp, synthetic construct
  misc_feature 1..1239: note = Variant of serine peptidase from Bacillus sinesaloumensis
  source 1..1239: mol_type = other DNA
atggcagatcaagctagtcaagctaatggaaaccaggacgtcattgaaggcgagctgatcgtttcagtggaaccgaagaacggtaaacctgatgtgagcattcaaagtgcacaatccgtaacagggcaggaagacgtccttaaatcgaaaggctttacgatcgttgataccttgcatgtagaggatagcagcgtcaagccactcgtctcgaagaatttcaataagaaagtggtggagaagatgggactggtgtatcttgttcaatactctccggaccagtttaaaagttccaacattgcgaagaaagaactcagaaaagaattgatggatctgggctttaaagtccgctatataagcgaaaattacaagatgatggcgatcgaaggtacagccactcttcaggcagtacaccctaaccaaaactggcattataatatgattaaagctccggaagcgtgggctattacgtctggatcctctgaggttaaagtagcagtcctggatacagggatcgaccataatcacccatccttggccaacttcgtgaatactaatcttggccggtcgtttgttggaggaaacaccatggatgttcaaggtcatggcacacatgttgctggcacgattgcatcttatgggagtgtaagcggagtgatgcagagtgcgacactgatcccggtcaaagtgctcgataattctggcagcgggtccctttacggtattacgcaaggcatattgtatgccgccgacatcgatgcggacgtcattaacatgtctctgggtggaggaggctataatcagagcatggatgaggctgttcaaacagcagttgctcagggaaccattgtagtagcagcgactggcaatgatggtgcatcgtcgatcagttatcctgctgcctacagcagcgtcattgcggtgggatctgtgacgtccaatcgtacacgatcctcgttttctaactatggatctgggcttgaagttatggcaccgggcagcaacatctacagtacgtatcctaattccagatatacatctttgagtggtacaagcatggctactccgcacgttgcgggcgtagctgggctcattcgcgcagccaacccagacatatctgtcgcgcaagcccgtcagattctgcgggataccgcgcaagaagcaggatcgttcacacagtacggctatggaatcgtcgatgctcatgccgccgttgttgctgcatccggtggtagcggcggc

SEQ ID NO: 36 - protein, 413 aa, synthetic construct
  REGION 1..413: note = Variant of serine peptidase from Bacillus sinesaloumensis
MADQASQANGNQDVIEGELIVSVEPKNGKPDVSIQSAQSVTGQEDVLKSKGFTIVDTLHVEDSSVKPLVSKNFNKKVVEKMGLVYLVQYSPDQFKSSNIAKKELRKELMDLGFKVRYISENYKMMAIEGTATLQAVHPNQNWHYNMIKAPEAWAITSGSSEVKVAVLDTGIDHNHPSLANFVNTNLGRSFVGGNTMDVQGHGTHVAGTIASYGSVSGVMQSATLIPVKVLDNSGSGSLYGITQGILYAADIDADVINMSLGGGGYNQSMDEAVQTAVAQGTIVVAATGNDGASSISYPAAYSSVIAVGSVTSNRTRSSFSNYGSGLEVMAPGSNIYSTYPNSRYTSLSGTSMATPHVAGVAGLIRAANPDISVAQARQILRDTAQEAGSFTQYGYGIVDAHAAVVAASGGSGG

SEQ ID NO: 37 - DNA, 1239 bp, synthetic construct
  misc_feature 1..1239: note = Variant of serine peptidase from Bacillus sinesaloumensis
  source 1..1239: mol_type = other DNA
atggcagatcaagctagtcaagctaatggaaaccaggacgtcattgaaggcgagctgatcgtttcagtggaaccgaagaacggtaaacctgatgtgagcattcaaagtgcacaatccgtaacagggcaggaagacgtccttaaatcgaaaggctttacgatcgttgataccttgcatgtagaggatagcagcgtcaagccactcgtctcgaagaatttcaataagaaagtggtggagaagatgggactggtgtatcttgttcaatactctccggaccagtttaaaagttccaacattgcgaagaaagaactcagaaaagaattgatggatctgggctttaaagtccgctatataagcgaaaattacaagatgatggcgatcgaaggtacagccactcttcaggcagtacaccctaaccaaacttggcattataatatgattaaagctccggaagcgtgggctattacgtctggatcctctagcgttaaagtagcagtcctggatacagggatcgaccataatcacccatccttggccaacttcgtgaatactaatcttggccggtcgtttgttggaggaaacaccatggatgttcaaggtcatggcacacatgttgctggcacgattgcatcttatgggagtgtaagcggagtgatgcagagtgcgacactgatcccggtcaaagtgctcgataattctggcagcgggtccctttacggtattacgcaaggcatattgtatgccgccgacatcgatgcggacgtcattaacatgtctctgggtggaggaggctataatcagagcatggatgaggctgttcaaacagcagttgctcagggaaccattgtagtagcagcgactggcaatgatggtgcatcgtcgatcagttatcctgctgcctacagcagcgtcattgcggtgggatctgtgacgtccaatcgtacacgatcctcgttttctaactatggatctgggcttgaagttatggcaccgggcagcaacatctacagtacgtatcctaattccagatatacatctttgagtggtacaagcatggctactccgcacgttgcgggcgtagctgggctcattcgcgcagccaacccagacatatctgtcgcgcaagcccgtcagattctgcgggataccgcgcaagaagcaggatcgttcacacagtacggctatggaatcgtcgatgctcatgccgccgttgttgctgcatccggtggtagcggcggc

SEQ ID NO: 38 - protein, 413 aa, synthetic construct
  REGION 1..413: note = Variant of serine peptidase from Bacillus sinesaloumensis
MADQASQANGNQDVIEGELIVSVEPKNGKPDVSIQSAQSVTGQEDVLKSKGFTIVDTLHVEDSSVKPLVSKNFNKKVVEKMGLVYLVQYSPDQFKSSNIAKKELRKELMDLGFKVRYISENYKMMAIEGTATLQAVHPNQTWHYNMIKAPEAWAITSGSSSVKVAVLDTGIDHNHPSLANFVNTNLGRSFVGGNTMDVQGHGTHVAGTIASYGSVSGVMQSATLIPVKVLDNSGSGSLYGITQGILYAADIDADVINMSLGGGGYNQSMDEAVQTAVAQGTIVVAATGNDGASSISYPAAYSSVIAVGSVTSNRTRSSFSNYGSGLEVMAPGSNIYSTYPNSRYTSLSGTSMATPHVAGVAGLIRAANPDISVAQARQILRDTAQEAGSFTQYGYGIVDAHAAVVAASGGSGG

SEQ ID NO: 39 - DNA, 1239 bp, synthetic construct
  misc_feature 1..1239: note = Variant of serine peptidase from Bacillus sinesaloumensis
  source 1..1239: mol_type = other DNA
atggcagatcaagctagtcaagctaatggaaaccaggacgtcattgaaggcgagctgatcgtttcagtggaaccgaagaacggtaaacctgatgtgagcattcaaagtgcacaatccgtaacagggcaggaagacgtccttaaatcgaaaggctttacgatcgttgataccttgcatgtagaggatagcagcgtcaagccactcgtctcgaagaatttcaataagaaagtggtggagaagatgggactggtgtatcttgttcaatactctccggaccagtttaaaagttccaacattgcgaagaaagaactcagaaaagaattgatggatctgggctttaaagtccgctatataagcgaaaattacaagatgatggcgatcgaaggtacagccactcttcaggcagtacaccctaaccaaaactggcattataatatgattaaagctccggaagcgtgggctattacgtctggatcctctagcgttaaagtagcagtcctggatacagggatcgaccataatcacccatccttggccaacttcgtgaatactaatcttggccggtcgtttgttggaggaaacaccatggatgttcaaggtcatggcacacatgttgctggcacgattgcatcttatgggagtgtaagcggagtgatgcagagtgcgacactgatcccggtcaaagtgctcgataattctggcagcgggtccctttacggtattacgcaaggcatattgtatgccgccgacatcgatgcggacgtcattaacatgtctctgggtggaggaggctataatttgagcatggatgaggctgttcaaacagcagttgctcagggaaccattgtagtagcagcgactggcaatgatggtgcatcgtcgatcagttatcctgctgcctacagcagcgtcattgcggtgggatctgtgacgtccaatcgtacacgatcctcgttttctaactatggatctgggcttgaagttatggcaccgggcagcaacatctacagtacgtatcctaattccagatatacatctttgagtggtacaagcatggctactccgcacgttgcgggcgtagctgggctcattcgcgcagccaacccagacatatctgtcgcgcaagcccgtcagattctgcgggataccgcgcaagaagcaggatcgttcacacagtacggctatggaatcgtcgatgctcatgccgccgttgttgctgcatccggtggtagcggcggc

SEQ ID NO: 40 - protein, 413 aa, synthetic construct
  REGION 1..413: note = Variant of serine peptidase from Bacillus sinesaloumensis
MADQASQANGNQDVIEGELIVSVEPKNGKPDVSIQSAQSVTGQEDVLKSKGFTIVDTLHVEDSSVKPLVSKNFNKKVVEKMGLVYLVQYSPDQFKSSNIAKKELRKELMDLGFKVRYISENYKMMAIEGTATLQAVHPNQNWHYNMIKAPEAWAITSGSSSVKVAVLDTGIDHNHPSLANFVNTNLGRSFVGGNTMDVQGHGTHVAGTIASYGSVSGVMQSATLIPVKVLDNSGSGSLYGITQGILYAADIDADVINMSLGGGGYNLSMDEAVQTAVAQGTIVVAATGNDGASSISYPAAYSSVIAVGSVTSNRTRSSFSNYGSGLEVMAPGSNIYSTYPNSRYTSLSGTSMATPHVAGVAGLIRAANPDISVAQARQILRDTAQEAGSFTQYGYGIVDAHAAVVAASGGSGG

SEQ ID NO: 41 - DNA, 1239 bp, synthetic construct
  misc_feature 1..1239: note = Variant of serine peptidase from Bacillus sinesaloumensis
  source 1..1239: mol_type = other DNA
atggcagatcaagctagtcaagctaatggaaaccaggacgtcattgaaggcgagctgatcgtttcagtggaaccgaagaacggtaaacctgatgtgagcattcaaagtgcacaatccgtaacagggcaggaagacgtccttaaatcgaaaggctttacgatcgttgataccttgcatgtagaggatagcagcgtcaagccactcgtctcgaagaatttcaataagaaagtggtggagaagatgggactggtgtatcttgttcaatactctccggaccagtttaaaagttccaacattgcgaagaaagaactcagaaaagaattgatggatctgggctttaaagtccgctatataagcgaaaattacaagatgatggcgatcgaaggtacagccactcttcaggcagtacaccctaaccaaaactggcattataatatgattaaagctccggaagcgtgggctattacgtctggatcctctagcgttaaagtagcagtcctggatacagggatcgaccataatcacccatccttgtcgaacttcgtgaatactaatcttggccggtcgtttgttggaggaaacaccatggatgttcaaggtcatggcacacatgttgctggcacgattgcatcttatgggagtgtaagcggagtgatgcagagtgcgacactgatcccggtcaaagtgctcgataattctggcagcgggtccctttacggtattacgcaaggcatattgtatgccgccgacatcgatgcggacgtcattaacatgtctctgggtggaggaggctataatcagagcatggatgaggctgttcaaacagcagttgctcagggaaccattgtagtagcagcgactggcaatgatggtgcatcgtcgatcagttatcctgctgcctacagcagcgtcattgcggtgggatctgtgacgtccaatcgtacacgatcctcgttttctaactatggatctgggcttgaagttatggcaccgggcagcaacatctacagtacgtatcctaattccagatatacatctttgagtggtacaagcatggctactccgcacgttgcgggcgtagctgggctcattcgcgcagccaacccagacatatctgtcgcgcaagcccgtcagattctgcgggataccgcgcaagaagcaggatcgttcacacagtacggctatggaatcgtcgatgctcatgccgccgttgttgctgcatccggtggtagcggcggc

SEQ ID NO: 42 - protein, 413 aa, synthetic construct
  REGION 1..413: note = Variant of serine peptidase from Bacillus sinesaloumensis
MADQASQANGNQDVIEGELIVSVEPKNGKPDVSIQSAQSVTGQEDVLKSKGFTIVDTLHVEDSSVKPLVSKNFNKKVVEKMGLVYLVQYSPDQFKSSNIAKKELRKELMDLGFKVRYISENYKMMAIEGTATLQAVHPNQNWHYNMIKAPEAWAITSGSSSVKVAVLDTGIDHNHPSLSNFVNTNLGRSFVGGNTMDVQGHGTHVAGTIASYGSVSGVMQSATLIPVKVLDNSGSGSLYGITQGILYAADIDADVINMSLGGGGYNQSMDEAVQTAVAQGTIVVAATGNDGASSISYPAAYSSVIAVGSVTSNRTRSSFSNYGSGLEVMAPGSNIYSTYPNSRYTSLSGTSMATPHVAGVAGLIRAANPDISVAQARQILRDTAQEAGSFTQYGYGIVDAHAAVVAASGGSGG

SEQ ID NO: 43 - DNA, 1239 bp, synthetic construct
  misc_feature 1..1239: note = Variant of serine peptidase from Bacillus sinesaloumensis
  source 1..1239: mol_type = other DNA
atggcagatcaagctagtcaagctaatggaaaccaggacgtcattgaaggcgagctgatcgtttcagtggaaccgaagaacggtaaacctgatgtgagcattcaaagtgcacaatccgtaacagggcaggaagacgtccttaaatcgaaaggctttacgatcgttgataccttgcatgtagaggatagcagcgtcaagccactcgtctcgaagaatttcaataagaaagtggtggagaagatgggactggtgtatcttgttcaatactctccggaccagtttaaaagttccaacattgcgaagaaagaactcagaaaagaattgatggatctgggctttaaagtccgctatataagcgaaaattacaagatgatggcgatcgaaggtacagccactcttcaggcagtacaccctaaccaaaactggcattataatatgattaaagctccggaagcgtgggctattacgtctggatcctctagcgttaaagtagcagtcctggatacagggatcgaccataatcacccatccttggccaacttcgtgaatactgtgcttggccggtcgtttgttggaggaaacaccatggatgttcaaggtcatggcacacatgttgctggcacgattgcatcttatgggagtgtaagcggagtgatgcagagtgcgacactgatcccggtcaaagtgctcgataattctggcagcgggtccctttacggtattacgcaaggcatattgtatgccgccgacatcgatgcggacgtcattaacatgtctctgggtggaggaggctataatcagagcatggatgaggctgttcaaacagcagttgctcagggaaccattgtagtagcagcgactggcaatgatggtgcatcgtcgatcagttatcctgctgcctacagcagcgtcattgcggtgggatctgtgacgtccaatcgtacacgatcctcgttttctaactatggatctgggcttgaagttatggcaccgggcagcaacatctacagtacgtatcctaattccagatatacatctttgagtggtacaagcatggctactccgcacgttgcgggcgtagctgggctcattcgcgcagccaacccagacatatctgtcgcgcaagcccgtcagattctgcgggataccgcgcaagaagcaggatcgttcacacagtacggctatggaatcgtcgatgctcatgccgccgttgttgctgcatccggtggtagcggcggc

SEQ ID NO: 44 - protein, 413 aa, synthetic construct
  REGION 1..413: note = Variant of serine peptidase from Bacillus sinesaloumensis
MADQASQANGNQDVIEGELIVSVEPKNGKPDVSIQSAQSVTGQEDVLKSKGFTIVDTLHVEDSSVKPLVSKNFNKKVVEKMGLVYLVQYSPDQFKSSNIAKKELRKELMDLGFKVRYISENYKMMAIEGTATLQAVHPNQNWHYNMIKAPEAWAITSGSSSVKVAVLDTGIDHNHPSLANFVNTVLGRSFVGGNTMDVQGHGTHVAGTIASYGSVSGVMQSATLIPVKVLDNSGSGSLYGITQGILYAADIDADVINMSLGGGGYNQSMDEAVQTAVAQGTIVVAATGNDGASSISYPAAYSSVIAVGSVTSNRTRSSFSNYGSGLEVMAPGSNIYSTYPNSRYTSLSGTSMATPHVAGVAGLIRAANPDISVAQARQILRDTAQEAGSFTQYGYGIVDAHAAVVAASGGSGG

SEQ ID NO: 45 - DNA, 1239 bp, synthetic construct
  misc_feature 1..1239: note = Variant of serine peptidase from Bacillus sinesaloumensis
  source 1..1239: mol_type = other DNA
atggcagatcaagctagtcaagctaatggaaaccaggacgtcattgaaggcgagctgatcgtttcagtggaaccgaagaacggtaaacctgatgtgagcattcaaagtgcacaatccgtaacagggcaggaagacgtccttaaatcgaaaggctttacgatcgttgataccttgcatgtagaggatagcagcgtcaagccactcgtctcgaagaatttcaataagaaagtggtggagaagatgggactggtgtatcttgttcaatactctccggaccagtttaaaagttccaacattgcgaagaaagaactcagaaaagaattgatggatctgggctttaaagtccgctatataagcgaaaattacaagatgatggcgatcgaaggtacagccactcttcaggcagtacaccctaaccaaaactggcattataatatgattaaagctccggaagcgtgggctattacgtctggatcctctagcgttaaagtagcagtcctggatacagggatcgaccataatcacccatccttggccaacttcgtgaatactaatcttggccggtcgtttgttggaggaaacaccatggatgttcaaggtcatggcacacatgttgctggcacgattgcatcttatgggagtgtaagcggagtgatgcagagtgcgacactgatcccggtcaaagtgctcgataattctggcagcgggtccctttacggtattacgcaaggcatattgtatgccgccgacatcgatgcggacgtcattaacatgtctctgggtggaggattgtataatcagagcatggatgaggctgttcaaacagcagttgctcagggaaccattgtagtagcagcgactggcaatgatggtgcatcgtcgatcagttatcctgctgcctacagcagcgtcattgcggtgggatctgtgacgtccaatcgtacacgatcctcgttttctaactatggatctgggcttgaagttatggcaccgggcagcaacatctacagtacgtatcctaattccagatatacatctttgagtggtacaagcatggctactccgcacgttgcgggcgtagctgggctcattcgcgcagccaacccagacatatctgtcgcgcaagcccgtcagattctgcgggataccgcgcaagaagcaggatcgttcacacagtacggctatggaatcgtcgatgctcatgccgccgttgttgctgcatccggtggtagcggcggc

SEQ ID NO: 46 - protein, 413 aa, synthetic construct
  REGION 1..413: note = Variant of serine peptidase from Bacillus sinesaloumensis
MADQASQANGNQDVIEGELIVSVEPKNGKPDVSIQSAQSVTGQEDVLKSKGFTIVDTLHVEDSSVKPLVSKNFNKKVVEKMGLVYLVQYSPDQFKSSNIAKKELRKELMDLGFKVRYISENYKMMAIEGTATLQAVHPNQNWHYNMIKAPEAWAITSGSSSVKVAVLDTGIDHNHPSLANFVNTNLGRSFVGGNTMDVQGHGTHVAGTIASYGSVSGVMQSATLIPVKVLDNSGSGSLYGITQGILYAADIDADVINMSLGGGLYNQSMDEAVQTAVAQGTIVVAATGNDGASSISYPAAYSSVIAVGSVTSNRTRSSFSNYGSGLEVMAPGSNIYSTYPNSRYTSLSGTSMATPHVAGVAGLIRAANPDISVAQARQILRDTAQEAGSFTQYGYGIVDAHAAVVAASGGSGG

SEQ ID NO: 47 - DNA, 1239 bp, synthetic construct
  misc_feature 1..1239: note = Variant of serine peptidase from Bacillus sinesaloumensis
  source 1..1239: mol_type = other DNA
atggcagatcaagctagtcaagctaatggaaaccaggacgtcattgaaggcgagctgatcgtttcagtggaaccgaagaacggtaaacctgatgtgagcattcaaagtgcacaatccgtaacagggcaggaagacgtccttaaatcgaaaggctttacgatcgttgataccttgcatgtagaggatagcagcgtcaagccactcgtctcgaagaatttcaataagaaagtggtggagaagatgggactggtgtatcttgttcaatactctccggaccagtttaaaagttccaacattgcgaagaaagaactcagaaaagaattgatggatctgggctttaaagtccgctatataagcgaaaattacaagatgatggcgatcgaaggtacagccactcttcaggcagtacaccctaaccaaaactggcattataatatgattaaagctccggaagcgtgggctattacgtctggatcctctagcgttaaagtagcagtcctggatacagggatcgaccataatcacccatccttggccaacttcgtgaatactaatcttggccggtcgtttgttggaggaaacaccatggatgtttgtggtcatggcacacatgttgctggcacgattgcatcttatgggagtgtaagcggagtgatgcagagtgcgacactgatcccggtcaaagtgctcgataattctggcagcgggtccctttacggtattacgcaaggcatattgtatgccgccgacatcgatgcggacgtcattaacatgtctctgggtggaggaggctataatcagagcatggatgaggctgttcaaacagcagttgctcagggaaccattgtagtagcagcgactggcaatgatggtgcatcgtcgatcagttatcctgctgcctacagcagcgtcattgcggtgggatctgtgacgtccaatcgtacacgatcctcgttttctaactatggatctgggcttgaagttatggcaccgggcagcaacatctacagtacgtatcctaattccagatatacatctttgagtggtacaagcatggctactccgcacgttgcgggcgtagctgggctcattcgcgcagccaacccagacatatctgtcgcgcaagcccgtcagattctgcgggataccgcgcaagaagcaggatcgttcacacagtacggctatggaatcgtcgatgctcatgccgccgttgttgctgcatccggtggtagcggcggc

SEQ ID NO: 48 - protein, 413 aa, synthetic construct
  REGION 1..413: note = Variant of serine peptidase from Bacillus sinesaloumensis
MADQASQANGNQDVIEGELIVSVEPKNGKPDVSIQSAQSVTGQEDVLKSKGFTIVDTLHVEDSSVKPLVSKNFNKKVVEKMGLVYLVQYSPDQFKSSNIAKKELRKELMDLGFKVRYISENYKMMAIEGTATLQAVHPNQNWHYNMIKAPEAWAITSGSSSVKVAVLDTGIDHNHPSLANFVNTNLGRSFVGGNTMDVCGHGTHVAGTIASYGSVSGVMQSATLIPVKVLDNSGSGSLYGITQGILYAADIDADVINMSLGGGGYNQSMDEAVQTAVAQGTIVVAATGNDGASSISYPAAYSSVIAVGSVTSNRTRSSFSNYGSGLEVMAPGSNIYSTYPNSRYTSLSGTSMATPHVAGVAGLIRAANPDISVAQARQILRDTAQEAGSFTQYGYGIVDAHAAVVAASGGSGG

SEQ ID NO: 49 - DNA, 1239 bp, synthetic construct
  misc_feature 1..1239: note = Variant of serine peptidase from Bacillus sinesaloumensis
  source 1..1239: mol_type = other DNA
atggcagatcaagctagtcaagctaatggaaaccaggacgtcattgaaggcgagctgatcgtttcagtggaaccgaagaacggtaaacctgatgtgagcattcaaagtgcacaatccgtaacagggcaggaagacgtccttaaatcgaaaggctttacgatcgttgataccttgcatgtagaggatagcagcgtcaagccactcgtctcgaagaatttcaataagaaagtggtggagaagatgggactggtgtatcttgttcaatactctccggaccagtttaaaagttccaacattgcgaagaaagaactcagaaaagaattgatggatctgggctttaaagtccgctatataagcgaaaattacaagatgatggcgatcgaaggtacagccactcttcaggcagtacaccctaaccaaaactggcattataatatgattaaagctccggaagcgtgggctattacgtctggatccatgagcgttaaagtagcagtcctggatacagggatcgaccataatcacccatccttggccaacttcgtgaatactaatcttggccggtcgtttgttggaggaaacaccatggatgttcaaggtcatggcacacatgttgctggcacgattgcatcttatgggagtgtaagcggagtgatgcagagtgcgacactgatcccggtcaaagtgctcgataattctggcagcgggtccctttacggtattacgcaaggcatattgtatgccgccgacatcgatgcggacgtcattaacatgtctctgggtggaggaggctataatcagagcatggatgaggctgttcaaacagcagttgctcagggaaccattgtagtagcagcgactggcaatgatggtgcatcgtcgatcagttatcctgctgcctacagcagcgtcattgcggtgggatctgtgacgtccaatcgtacacgatcctcgttttctaactatggatctgggcttgaagttatggcaccgggcagcaacatctacagtacgtatcctaattccagatatacatctttgagtggtacaagcatggctactccgcacgttgcgggcgtagctgggctcattcgcgcagccaacccagacatatctgtcgcgcaagcccgtcagattctgcgggataccgcgcaagaagcaggatcgttcacacagtacggctatggaatcgtcgatgctcatgccgccgttgttgctgcatccggtggtagcggcggc

SEQ ID NO: 50 - protein, 413 aa, synthetic construct
  REGION 1..413: note = Variant of serine peptidase from Bacillus sinesaloumensis
MADQASQANGNQDVIEGELIVSVEPKNGKPDVSIQSAQSVTGQEDVLKSKGFTIVDTLHVEDSSVKPLVSKNFNKKVVEKMGLVYLVQYSPDQFKSSNIAKKELRKELMDLGFKVRYISENYKMMAIEGTATLQAVHPNQNWHYNMIKAPEAWAITSGSMSVKVAVLDTGIDHNHPSLANFVNTNLGRSFVGGNTMDVQGHGTHVAGTIASYGSVSGVMQSATLIPVKVLDNSGSGSLYGITQGILYAADIDADVINMSLGGGGYNQSMDEAVQTAVAQGTIVVAATGNDGASSISYPAAYSSVIAVGSVTSNRTRSSFSNYGSGLEVMAPGSNIYSTYPNSRYTSLSGTSMATPHVAGVAGLIRAANPDISVAQARQILRDTAQEAGSFTQYGYGIVDAHAAVVAASGGSGG

SEQ ID NO: 51 - DNA, 1239 bp, synthetic construct
  misc_feature 1..1239: note = Variant of serine peptidase from Bacillus sinesaloumensis
  source 1..1239: mol_type = other DNA
atggcagatcaagctagtcaagctaatggaaaccaggacgtcattgaaggcgagctgatcgtttcagtggaaccgaagaacggtaaacctgatgtgagcattcaaagtgcacaatccgtaacagggcaggaagacgtccttaaatcgaaaggctttacgatcgttgataccttgcatgtagaggatagcagcgtcaagccactcgtctcgaagaatttcaataagaaagtggtggagaagatgggactggtgtatcttgttcaatactctccggaccagtttaaaagttccaacattgcgaagaaagaactcagaaaagaattgatggatctgggctttaaagtccgctatataagcgaaaattacaagatgatggcgatcgaaggtacagccactcttcaggcagtacaccagaaccaaaactggcattataatatgattaaagctccggaagcgtgggctattacgtctggatcctctagcgttaaagtagcagtcctggatacagggatcgaccataatcacccatccttggccaacttcgtgaatactaatcttggccggtcgtttgttggaggaaacaccatggatgttcaaggtcatggcacacatgttgctggcacgattgcatcttatgggagtgtaagcggagtgatgcagagtgcgacactgatcccggtcaaagtgctcgataattctggcagcgggtccctttacggtattacgcaaggcatattgtatgccgccgacatcgatgcggacgtcattaacatgtctctgggtggaggaggctataatcagagcatggatgaggctgttcaaacagcagttgctcagggaaccattgtagtagcagcgactggcaatgatggtgcatcgtcgatcagttatcctgctgcctacagcagcgtcattgcggtgggatctgtgacgtccaatcgtacacgatcctcgttttctaactatggatctgggcttgaagttatggcaccgggcagcaacatctacagtacgtatcctaattccagatatacatctttgagtggtacaagcatggctactccgcacgttgcgggcgtagctgggctcattcgcgcagccaacccagacatatctgtcgcgcaagcccgtcagattctgcgggataccgcgcaagaagcaggatcgttcacacagtacggctatggaatcgtcgatgctcatgccgccgttgttgctgcatccggtggtagcggcggc

SEQ ID NO: 52 - protein, 413 aa, synthetic construct
  REGION 1..413: note = Variant of serine peptidase from Bacillus sinesaloumensis
MADQASQANGNQDVIEGELIVSVEPKNGKPDVSIQSAQSVTGQEDVLKSKGFTIVDTLHVEDSSVKPLVSKNFNKKVVEKMGLVYLVQYSPDQFKSSNIAKKELRKELMDLGFKVRYISENYKMMAIEGTATLQAVHQNQNWHYNMIKAPEAWAITSGSSSVKVAVLDTGIDHNHPSLANFVNTNLGRSFVGGNTMDVQGHGTHVAGTIASYGSVSGVMQSATLIPVKVLDNSGSGSLYGITQGILYAADIDADVINMSLGGGGYNQSMDEAVQTAVAQGTIVVAATGNDGASSISYPAAYSSVIAVGSVTSNRTRSSFSNYGSGLEVMAPGSNIYSTYPNSRYTSLSGTSMATPHVAGVAGLIRAANPDISVAQARQILRDTAQEAGSFTQYGYGIVDAHAAVVAASGGSGG

SEQ ID NO: 53 - DNA, 1239 bp, synthetic construct
  misc_feature 1..1239: note = Variant of serine peptidase from Bacillus sinesaloumensis
  source 1..1239: mol_type = other DNA
atggcagatcaagctagtcaagctaatggaaaccaggacgtcattgaaggcgagctgatcgtttcagtggaaccgaagaacggtaaacctgatgtgagcattcaaagtgcacaatccgtaacagggcaggaagacgtccttaaatcgaaaggctttacgatcgttgataccttgcatgtagaggatagcagcgtcaagccactcgtctcgaagaatttcaataagaaagtggtggagaagatgggactggtgtatcttgttcaatactctccggaccagtttaaaagttccaacattgcgaagaaagaactcagaaaagaattgatggatctgggctttaaagtccgctatataagcgaaaattacaagatgatggcgatcgaaggtacatatactcttcaggcagtacaccctaaccaaaactggcattataatatgattaaagctccggaagcgtgggctattacgtctggatcctctagcgttaaagtagcagtcctggatacagggatcgaccataatcacccatccttggccaacttcgtgaatactaatcttggccggtcgtttgttggaggaaacaccatggatgttcaaggtcatggcacacatgttgctggcacgattgcatcttatgggagtgtaagcggagtgatgcagagtgcgacactgatcccggtcaaagtgctcgataattctggcagcgggtccctttacggtattacgcaaggcatattgtatgccgccgacatcgatgcggacgtcattaacatgtctctgggtggaggaggctataatcagagcatggatgaggctgttcaaacagcagttgctcagggaaccattgtagtagcagcgactggcaatgatggtgcatcgtcgatcagttatcctgctgcctacagcagcgtcattgcggtgggatctgtgacgtccaatcgtacacgatcctcgttttctaactatggatctgggcttgaagttatggcaccgggcagcaacatctacagtacgtatcctaattccagatatacatctttgagtggtacaagcatggctactccgcacgttgcgggcgtagctgggctcattcgcgcagccaacccagacatatctgtcgcgcaagcccgtcagattctgcgggataccgcgcaagaagcaggatcgttcacacagtacggctatggaatcgtcgatgctcatgccgccgttgttgctgcatccggtggtagcggcggc

SEQ ID NO: 54 - protein, 413 aa, synthetic construct
  REGION 1..413: note = Variant of serine peptidase from Bacillus sinesaloumensis
MADQASQANGNQDVIEGELIVSVEPKNGKPDVSIQSAQSVTGQEDVLKSKGFTIVDTLHVEDSSVKPLVSKNFNKKVVEKMGLVYLVQYSPDQFKSSNIAKKELRKELMDLGFKVRYISENYKMMAIEGTYTLQAVHPNQNWHYNMIKAPEAWAITSGSSSVKVAVLDTGIDHNHPSLANFVNTNLGRSFVGGNTMDVQGHGTHVAGTIASYGSVSGVMQSATLIPVKVLDNSGSGSLYGITQGILYAADIDADVINMSLGGGGYNQSMDEAVQTAVAQGTIVVAATGNDGASSISYPAAYSSVIAVGSVTSNRTRSSFSNYGSGLEVMAPGSNIYSTYPNSRYTSLSGTSMATPHVAGVAGLIRAANPDISVAQARQILRDTAQEAGSFTQYGYGIVDAHAAVVAASGGSGG

SEQ ID NO: 55 - DNA, 1239 bp, synthetic construct
  misc_feature 1..1239: note = Variant of serine peptidase from Bacillus sinesaloumensis
  source 1..1239: mol_type = other DNA
atggcagatcaagctagtcaagctaatggaaaccaggacgtcattgaaggcgagctgatcgtttcagtggaaccgaagaacggtaaacctgatgtgagcattcaaagtgcacaatccgtaacagggcaggaagacgtccttaaatcgaaaggctttacgatcgttgataccttgcatgtagaggatagcagcgtcaagccactcgtctcgaagaatttcaataagaaagtggtggagaagatgggactggtgtatcttgttcaatactctccggaccagtttaaaagttccaacattgcgaagaaagaactcagaaaagaattgatggatctgggctttaaagtccgctatataagcgaaaattacaagatgatggcgatcgaaggtacagccactcttcaggcagtacaccctaaccaaaactggcattataatatgattaaagctccggaagcgtgggctattacgtctggatcctctagcgttaaagtagcagtcctggatacagggatcgaccataatcacccatccttggccaacttcgtgaatgataatcttggccggtcgtttgttggaggaaacaccatggatgttcaaggtcatggcacacatgttgctggcacgattgcatcttatgggagtgtaagcggagtgatgcagagtgcgacactgatcccggtcaaagtgctcgataattctggcagcgggtccctttacggtattacgcaaggcatattgtatgccgccgacatcgatgcggacgtcattaacatgtctctgggtggaggaggctataatcagagcatggatgaggctgttcaaacagcagttgctcagggaaccattgtagtagcagcgactggcaatgatggtgcatcgtcgatcagttatcctgctgcctacagcagcgtcattgcggtgggatctgtgacgtccaatcgtacacgatcctcgttttctaactatggatctgggcttgaagttatggcaccgggcagcaacatctacagtacgtatcctaattccagatatacatctttgagtggtacaagcatggctactccgcacgttgcgggcgtagctgggctcattcgcgcagccaacccagacatatctgtcgcgcaagcccgtcagattctgcgggataccgcgcaagaagcaggatcgttcacacagtacggctatggaatcgtcgatgctcatgccgccgttgttgctgcatccggtggtagcggcggc

SEQ ID NO: 56 - protein, 413 aa, synthetic construct
  REGION 1..413: note = Variant of serine peptidase from Bacillus sinesaloumensis
MADQASQANGNQDVIEGELIVSVEPKNGKPDVSIQSAQSVTGQEDVLKSKGFTIVDTLHVEDSSVKPLVSKNFNKKVVEKMGLVYLVQYSPDQFKSSNIAKKELRKELMDLGFKVRYISENYKMMAIEGTATLQAVHPNQNWHYNMIKAPEAWAITSGSSSVKVAVLDTGIDHNHPSLANFVNDNLGRSFVGGNTMDVQGHGTHVAGTIASYGSVSGVMQSATLIPVKVLDNSGSGSLYGITQGILYAADIDADVINMSLGGGGYNQSMDEAVQTAVAQGTIVVAATGNDGASSISYPAAYSSVIAVGSVTSNRTRSSFSNYGSGLEVMAPGSNIYSTYPNSRYTSLSGTSMATPHVAGVAGLIRAANPDISVAQARQILRDTAQEAGSFTQYGYGIVDAHAAVVAASGGSGG

SEQ ID NO: 57 - DNA, 1239 bp, synthetic construct
  misc_feature 1..1239: note = Variant of serine peptidase from Bacillus sinesaloumensis
  source 1..1239: mol_type = other DNA
atggcagatcaagctagtcaagctaatggaaaccaggacgtcattgaaggcgagctgatcgtttcagtggaaccgaagaacggtaaacctgatgtgagcattcaaagtgcacaatccgtaacagggcaggaagacgtccttaaatcgaaaggctttacgatcgttgataccttgcatgtagaggatagcagcgtcaagccactcgtctcgaagaatttcaataagaaagtggtggagaagatgggactggtgtatcttgttcaatactctccggaccagtttaaaagttccaacattgcgaagaaagaactcagaaaagaattgatggatctgggctttaaagtccgctatataagcgaaaattacaagatgatggcgatcgaaggtacagccactcttcaggcagtacaccctaaccaaaactggcattataatatgattaaagctccggaagcgtgggctattacgtctggatcctctagcgttaaagtagcagtcctggatacagggatcgaccataatcacccatccttggccaacttcgtgaatactaatcttggccggtcgtttgttggaggaaacaccatggatgttcaaggtcatggcacacatgttgctggcacgattgcatcttatgggagtgtaagcggagtgatgcagagtgcgacactgatcccggtcaaagtgctcgataattctggcagcgggtccctttacggtattacgcaaggcatattgtatgccgccgacatcgatgcggacgtcattaacatgtctctgggtggaggaggctataatcagagcatggatgaggctgttcaaacagcagttgctcagggaaccattgtagtagcagcgactggcaatgatggtgcatcgtcgatcagttatcctgctgcctacagcagcgtcattgcggtgggatctgtgacgtccaatcgtacacgatcctcgttttctaactatggatctgggcttgaagttatggcaccgggcagcaacatctacagtacgtatcctaattccagatatacatctttgagtggtacaagcatggctactccgcacgttgcgggcgtagctgggctcattcgcgcagccaacccagacatacgtgtcgcgcaagcccgtcagattctgcgggataccgcgcaagaagcaggatcgttcacacagtacggctatggaatcgtcgatgctcatgccgccgttgttgctgcatccggtggtagcggcggc

SEQ ID NO: 58 - protein, 413 aa, synthetic construct
  REGION 1..413: note = Variant of serine peptidase from Bacillus sinesaloumensis
MADQASQANGNQDVIEGELIVSVEPKNGKPDVSIQSAQSVTGQEDVLKSKGFTIVDTLHVEDSSVKPLVSKNFNKKVVEKMGLVYLVQYSPDQFKSSNIAKKELRKELMDLGFKVRYISENYKMMAIEGTATLQAVHPNQNWHYNMIKAPEAWAITSGSSSVKVAVLDTGIDHNHPSLANFVNTNLGRSFVGGNTMDVQGHGTHVAGTIASYGSVSGVMQSATLIPVKVLDNSGSGSLYGITQGILYAADIDADVINMSLGGGGYNQSMDEAVQTAVAQGTIVVAATGNDGASSISYPAAYSSVIAVGSVTSNRTRSSFSNYGSGLEVMAPGSNIYSTYPNSRYTSLSGTSMATPHVAGVAGLIRAANPDIRVAQARQILRDTAQEAGSFTQYGYGIVDAHAAVVAASGGSGG

SEQ ID NO: 59 - DNA, 1239 bp, synthetic construct
  misc_feature 1..1239: note = Variant of serine peptidase from Bacillus sinesaloumensis
  source 1..1239: mol_type = other DNA
atggcagatcaagctagtcaagctaatggaaaccaggacgtcattgaaggcgagctgatcgtttcagtggaaccgaagaacggtaaacctgatgtgagcattcaaagtgcacaatccgtaacagggcaggaagacgtccttaaatcgaaaggctttacgatcgttgataccttgcatgtagaggatagcagcgtcaagccactcgtctcgaagaatttcaataagaaagtggtggagaagatgggactggtgtatcttgttcaatactctccggaccagtttaaaagttccaacattgcgaagaaagaactcagaaaagaattgatggatctgggctttaaagtccgctatataagcgaaaattacaagatgatggcgatcgaaggtacagccactcttttggcagtacaccctaaccaaaactggcattataatatgattaaagctccggaagcgtgggctattacgtctggatcctctagcgttaaagtagcagtcctggatacagggatcgaccataatcacccatccttggccaacttcgtgaatactaatcttggccggtcgtttgttggaggaaacaccatggatgttcaaggtcatggcacacatgttgctggcacgattgcatcttatgggagtgtaagcggagtgatgcagagtgcgacactgatcccggtcaaagtgctcgataattctggcagcgggtccctttacggtattacgcaaggcatattgtatgccgccgacatcgatgcggacgtcattaacatgtctctgggtggaggaggctataatcagagcatggatgaggctgttcaaacagcagttgctcagggaaccattgtagtagcagcgactggcaatgatggtgcatcgtcgatcagttatcctgctgcctacagcagcgtcattgcggtgggatctgtgacgtccaatcgtacacgatcctcgttttctaactatggatctgggcttgaagttatggcaccgggcagcaacatctacagtacgtatcctaattccagatatacatctttgagtggtacaagcatggctactccgcacgttgcgggcgtagctgggctcattcgcgcagccaacccagacatatctgtcgcgcaagcccgtcagattctgcgggataccgcgcaagaagcaggatcgttcacacagtacggctatggaatcgtcgatgctcatgccgccgttgttgctgcatccggtggtagcggcggc

SEQ ID NO: 60 - protein, 413 aa, synthetic construct
  REGION 1..413: note = Variant of serine peptidase from Bacillus sinesaloumensis
MADQASQANGNQDVIEGELIVSVEPKNGKPDVSIQSAQSVTGQEDVLKSKGFTIVDTLHVEDSSVKPLVSKNFNKKVVEKMGLVYLVQYSPDQFKSSNIAKKELRKELMDLGFKVRYISENYKMMAIEGTATLLAVHPNQNWHYNMIKAPEAWAITSGSSSVKVAVLDTGIDHNHPSLANFVNTNLGRSFVGGNTMDVQGHGTHVAGTIASYGSVSGVMQSATLIPVKVLDNSGSGSLYGITQGILYAADIDADVINMSLGGGGYNQSMDEAVQTAVAQGTIVVAATGNDGASSISYPAAYSSVIAVGSVTSNRTRSSFSNYGSGLEVMAPGSNIYSTYPNSRYTSLSGTSMATPHVAGVAGLIRAANPDISVAQARQILRDTAQEAGSFTQYGYGIVDAHAAVVAASGGSGG

SEQ ID NO: 61 - DNA, 1239 bp, synthetic construct
  misc_feature 1..1239: note = Variant of serine peptidase from Bacillus sinesaloumensis
  source 1..1239: mol_type = other DNA
atggcagatcaagctagtcaagctaatggaaaccaggacgtcattgaaggcgagctgatcgtttcagtggaaccgaagaacggtaaacctgatgtgagcattcaaagtgcacaatccgtaacagggcaggaagacgtccttaaatcgaaaggctttacgatcgttgataccttgcatgtagaggatagcagcgtcaagccactcgtctcgaagaatttcaataagaaagtggtggagaagatgggactggtgtatcttgttcaatactctccggaccagtttaaaagttccaacattgcgaagaaagaactcagaaaagaattgatggatctgggctttaaagtccgctatataagcgaaaattacaagatgatggcgatcgaaggtacagccactcttcaggcagtacaccctaaccaaaactggcattataatatgattaaagctccggaagcgtgggctattacgtctggatcctctagcgttaaagtagcagtcctggatacagggatcgaccataatcacccatccttggccaacttcgtgaatactaatcttggccggtcgtttgttggaggaaacaccatggatgttcaaggtcatggcacacatgttgctggcacgattgcatcttatgggagtgtaagcggagtgatgcagagtgcgacactgatcccggtcaaagtgctcgataattctggcagcgggtccctttacggtattacgcaaggcatattgtatgccgccgacatcgatgcggacgtcattaacatgtctctgggtggaggaggctataatcagagcatggatgaggctgttcaaacagcagttgctcagggaaccattgtagtagcagcgactggcaatgatggtgcatcgtcgatcagttatcctgctgcctacagcagcgtcattgcggtgggatctgtgacgtccaatcgtacacgatcctcgttttctaactatggatctgggcttgaagttatggcaccgggcagcaacatctacagtacgtatcctaattccagatatacatctttgagtggtacaagcatggctactccgcacgttgcgggcgtagctgggctcattcgcgcagccaacccacggatatctgtcgcgcaagcccgtcagattctgcgggataccgcgcaagaagcaggatcgttcacacagtacggctatggaatcgtcgatgctcatgccgccgttgttgctgcatccggtggtagcggcggc

SEQ ID NO: 62 - protein, 413 aa, synthetic construct
  REGION 1..413: note = Variant of serine peptidase from Bacillus sinesaloumensis
MADQASQANGNQDVIEGELIVSVEPKNGKPDVSIQSAQSVTGQEDVLKSKGFTIVDTLHVEDSSVKPLVSKNFNKKVVEKMGLVYLVQYSPDQFKSSNIAKKELRKELMDLGFKVRYISENYKMMAIEGTATLQAVHPNQNWHYNMIKAPEAWAITSGSSSVKVAVLDTGIDHNHPSLANFVNTNLGRSFVGGNTMDVQGHGTHVAGTIASYGSVSGVMQSATLIPVKVLDNSGSGSLYGITQGILYAADIDADVINMSLGGGGYNQSMDEAVQTAVAQGTIVVAATGNDGASSISYPAAYSSVIAVGSVTSNRTRSSFSNYGSGLEVMAPGSNIYSTYPNSRYTSLSGTSMATPHVAGVAGLIRAANPRISVAQARQILRDTAQEAGSFTQYGYGIVDAHAAVVAASGGSGG

SEQ ID NO: 63 - DNA, 1239 bp, synthetic construct
  misc_feature 1..1239: note = Variant of serine peptidase from Bacillus sinesaloumensis
  source 1..1239: mol_type = other DNA
atggcagatcaagctagtcaagctaatggaaaccaggacgtcattgaaggcgagctgatcgtttcagtggaaccgaagaacggtaaacctgatgtgagcattcaaagtgcacaatccgtaacagggcaggaagacgtccttaaatcgaaaggctttacgatcgttgataccttgcatgtagaggatagcagcgtcaagccactcgtctcgaagaatttcaataagaaagtggtggagaagatgggactggtgtatcttgttcaatactctccggaccagtttaaaagttccaacattgcgaagaaagaactcagaaaagaattgatggatctgggctttaaagtccgctatataagcgaaaattacaagatgatggcgatcgaaggtacagccactcttcaggcagtacaccctaaccaaaactggcattataatatgattaaagctccggaagcgtgggctattacgtctggatcctctagcgttaaagtagcagtcctggatacagggatcgaccataatcacccatccttggccaacttcgtgaatactaatcttggccggtcgtttgttggaggaaacaccatggatgttcaaggtcatggcacacatgttgctggcacgattgcatcttatgggagtgtaagcggagtgatgcagagtgcgacactgatcccggtcaaagtgctcgataattctggcagcgggtccctttacggtattacgcaaggcatattgtatgccgccgacatcgatgcggacgtcattaacatgtctctgggtggaggaggctataatcagagcatggatgaggctgttcaaacagcagttgctcagggaaccattgtagtagcagcgactggcaatgatggtgcatcgtcgatcagttatcctgctgcctacagcagcgtcattgcggtgggatctgtgacgtccaatcgtacacgatcctcgttttctaactatggatctgggcttgaagttatggcaccgggcagcaacatctacagtacgtatcctaattccagatatacatctttgagtggtacaagcatggctactccgcacgttgcgggcgtagctgggctcattcgcgcagccaacccaattatatctgtcgcgcaagcccgtcagattctgcgggataccgcgcaagaagcaggatcgttcacacagtacggctatggaatcgtcgatgctcatgccgccgttgttgctgcatccggtggtagcggcggc

SEQ ID NO: 64 - protein, 413 aa, synthetic construct
  REGION 1..413: note = Variant of serine peptidase from Bacillus sinesaloumensis
MADQASQANGNQDVIEGELIVSVEPKNGKPDVSIQSAQSVTGQEDVLKSKGFTIVDTLHVEDSSVKPLVSKNFNKKVVEKMGLVYLVQYSPDQFKSSNIAKKELRKELMDLGFKVRYISENYKMMAIEGTATLQAVHPNQNWHYNMIKAPEAWAITSGSSSVKVAVLDTGIDHNHPSLANFVNTNLGRSFVGGNTMDVQGHGTHVAGTIASYGSVSGVMQSATLIPVKVLDNSGSGSLYGITQGILYAADIDADVINMSLGGGGYNQSMDEAVQTAVAQGTIVVAATGNDGASSISYPAAYSSVIAVGSVTSNRTRSSFSNYGSGLEVMAPGSNIYSTYPNSRYTSLSGTSMATPHVAGVAGLIRAANPIISVAQARQILRDTAQEAGSFTQYGYGIVDAHAAVVAASGGSGG

SEQ ID NO: 65 - DNA, 1239 bp, synthetic construct
  misc_feature 1..1239: note = Variant of serine peptidase from Bacillus sinesaloumensis
  source 1..1239: mol_type = other DNA
atggcagatcaagctagtcaagctaatggaaaccaggacgtcattgaaggcgagctgatcgtttcagtggaaccgaagaacggtaaacctgatgtgagcattcaaagtgcacaatccgtaacagggcaggaagacgtccttaaatcgaaaggctttacgatcgttgataccttgcatgtagaggatagcagcgtcaagccactcgtctcgaagaatttcaataagaaagtggtggagaagatgggactggtgtatcttgttcaatactctccggaccagtttaaaagttccaacattgcgaagaaagaactcagaaaagaattgatggatctgggctttaaagtccgctatataagcgaaaattacaagatgatggcgatcgaaggtacagccactcttgaggcagtacaccctaaccaaaactggcattataatatgattaaagctccggaagcgtgggctattacgtctggatcctctagcgttaaagtagcagtcctggatacagggatcgaccataatcacccatccttggccaacttcgtgaatactaatcttggccggtcgtttgttggaggaaacaccatggatgttcaaggtcatggcacacatgttgctggcacgattgcatcttatgggagtgtaagcggagtgatgcagagtgcgacactgatcccggtcaaagtgctcgataattctggcagcgggtccctttacggtattacgcaaggcatattgtatgccgccgacatcgatgcggacgtcattaacatgtctctgggtggaggaggctataatcagagcatggatgaggctgttcaaacagcagttgctcagggaaccattgtagtagcagcgactggcaatgatggtgcatcgtcgatcagttatcctgctgcctacagcagcgtcattgcggtgggatctgtgacgtccaatcgtacacgatcctcgttttctaactatggatctgggcttgaagttatggcaccgggcagcaacatctacagtacgtatcctaattccagatatacatctttgagtggtacaagcatggctactccgcacgttgcgggcgtagctgggctcattcgcgcagccaacccagacatatctgtcgcgcaagcccgtcagattctgcgggataccgcgcaagaagcaggatcgttcacacagtacggctatggaatcgtcgatgctcatgccgccgttgttgctgcatccggtggtagcggcggc

SEQ ID NO: 66 - protein, 413 aa, synthetic construct
  REGION 1..413: note = Variant of serine peptidase from Bacillus sinesaloumensis
MADQASQANGNQDVIEGELIVSVEPKNGKPDVSIQSAQSVTGQEDVLKSKGFTIVDTLHVEDSSVKPLVSKNFNKKVVEKMGLVYLVQYSPDQFKSSNIAKKELRKELMDLGFKVRYISENYKMMAIEGTATLEAVHPNQNWHYNMIKAPEAWAITSGSSSVKVAVLDTGIDHNHPSLANFVNTNLGRSFVGGNTMDVQGHGTHVAGTIASYGSVSGVMQSATLIPVKVLDNSGSGSLYGITQGILYAADIDADVINMSLGGGGYNQSMDEAVQTAVAQGTIVVAATGNDGASSISYPAAYSSVIAVGSVTSNRTRSSFSNYGSGLEVMAPGSNIYSTYPNSRYTSLSGTSMATPHVAGVAGLIRAANPDISVAQARQILRDTAQEAGSFTQYGYGIVDAHAAVVAASGGSGG

SEQ ID NO: 67 - DNA, 1239 bp, synthetic construct
  misc_feature 1..1239: note = Variant of serine peptidase from Bacillus sinesaloumensis
  source 1..1239: mol_type = other DNA
atggcagatcaagctagtcaagctaatggaaaccaggacgtcattgaaggcgagctgatcgtttcagtggaaccgaagaacggtaaacctgatgtgagcattcaaagtgcacaatccgtaacagggcaggaagacgtccttaaatcgaaaggctttacgatcgttgataccttgcatgtagaggatagcagcgtcaagccactcgtctcgaagaatttcaataagaaagtggtggagaagatgggactggtgtatcttgttcaatactctccggaccagtttaaaagttccaacattgcgaagaaagaactcagaaaagaattgatggatctgggctttaaagtccgctatataagcgaaaattacaagatgatggcgatcgaaggtacagccactcttcaggcagtacaccctaaccaaaactggcattataatatgattaaagctccggaagcgtgggctattacgtctggatcctctagcgttaaagtagcagtcctggatacagggatcgaccataatcacccatccttggccaacttcgtgaatactaatcttggccggtcgtttgttggaggaaacaccatggatgttcaaggtcatggcacacatgttgctggcacgattgcatcttatgggagtgtaagcggagtgatgcagagtgcgacactgatcccggtcaaagtgctcgataattctggcagcgggtccctttacggtattacgcaaggcatattgtatgccgccgacatcgatgcggacgtcattaacatgtctctgggtggaggaggctataatcagagcatggatgaggctgttcaaacagcagttgctcagggaaccattgtagtagcagcgactggcaatgatggtgcatcgtcgatcagttatcctgctgcctacagcagcgtcattgcggtgggatctgtgacgtccaatcgtacacgatcctcgttttctaactatggatctgggcttgaagttatggcaccgggcagcaacatctacagtacgtatcctaattccagatatacatctttgagtggtacaagcatggctactccgcacgttgcgggcgtagctgggctcattcgcgcagccgggccagacatatctgtcgcgcaagcccgtcagattctgcgggataccgcgcaagaagcaggatcgttcacacagtacggctatggaatcgtcgatgctcatgccgccgttgttgctgcatccggtggtagcggcggc

SEQ ID NO: 68 - protein, 413 aa, synthetic construct
  REGION 1..413: note = Variant of serine peptidase from Bacillus sinesaloumensis
MADQASQANGNQDVIEGELIVSVEPKNGKPDVSIQSAQSVTGQEDVLKSKGFTIVDTLHVEDSSVKPLVSKNFNKKVVEKMGLVYLVQYSPDQFKSSNIAKKELRKELMDLGFKVRYISENYKMMAIEGTATLQAVHPNQNWHYNMIKAPEAWAITSGSSSVKVAVLDTGIDHNHPSLANFVNTNLGRSFVGGNTMDVQGHGTHVAGTIASYGSVSGVMQSATLIPVKVLDNSGSGSLYGITQGILYAADIDADVINMSLGGGGYNQSMDEAVQTAVAQGTIVVAATGNDGASSISYPAAYSSVIAVGSVTSNRTRSSFSNYGSGLEVMAPGSNIYSTYPNSRYTSLSGTSMATPHVAGVAGLIRAAGPDISVAQARQILRDTAQEAGSFTQYGYGIVDAHAAVVAASGGSGG

SEQ ID NO: 69 - DNA, 1239 bp, synthetic construct
  misc_feature 1..1239: note = Variant of serine peptidase from Bacillus sinesaloumensis
  source 1..1239: mol_type = other DNA
atggcagatcaagctagtcaagctaatggaaaccaggacgtcattgaaggcgagctgatcgtttcagtggaaccgaagaacggtaaacctgatgtgagcattcaaagtgcacaatccgtaacagggcaggaagacgtccttaaatcgaaaggctttacgatcgttgataccttgcatgtagaggatagcagcgtcaagccactcgtctcgaagaatttcaataagaaagtggtggagaagatgggactggtgtatcttgttcaatactctccggaccagtttaaaagttccaacattgcgaagaaagaactcagaaaagaattgatggatctgggctttaaagtccgctatataagcgaaaattacaagatgatggcgatcgaaggtacagccactcttcaggcagtacaccctaaccaaaactggcattataatatgattaaagctccggatgcgtgggctattacgtctggatcctctagcgttaaagtagcagtcctggatacagggatcgaccataatcacccatccttggccaacttcgtgaatactaatcttggccggtcgtttgttggaggaaacaccatggatgttcaaggtcatggcacacatgttgctggcacgattgcatcttatgggagtgtaagcggagtgatgcagagtgcgacactgatcccggtcaaagtgctcgataattctggcagcgggtccctttacggtattacgcaaggcatattgtatgccgccgacatcgatgcggacgtcattaacatgtctctgggtggaggaggctataatcagagcatggatgaggctgttcaaacagcagttgctcagggaaccattgtagtagcagcgactggcaatgatggtgcatcgtcgatcagttatcctgctgcctacagcagcgtcattgcggtgggatctgtgacgtccaatcgtacacgatcctcgttttctaactatggatctgggcttgaagttatggcaccgggcagcaacatctacagtacgtatcctaattccagatatacatctttgagtggtacaagcatggctactccgcacgttgcgggcgtagctgggctcattcgcgcagccaacccagacatatctgtcgcgcaagcccgtcagattctgcgggataccgcgcaagaagcaggatcgttcacacagtacggctatggaatcgtcgatgctcatgccgccgttgttgctgcatccggtggtagcggcggc

SEQ ID NO: 70 - protein, 413 aa, synthetic construct
  REGION 1..413: note = Variant of serine peptidase from Bacillus sinesaloumensis
MADQASQANGNQDVIEGELIVSVEPKNGKPDVSIQSAQSVTGQEDVLKSKGFTIVDTLHVEDSSVKPLVSKNFNKKVVEKMGLVYLVQYSPDQFKSSNIAKKELRKELMDLGFKVRYISENYKMMAIEGTATLQAVHPNQNWHYNMIKAPDAWAITSGSSSVKVAVLDTGIDHNHPSLANFVNTNLGRSFVGGNTMDVQGHGTHVAGTIASYGSVSGVMQSATLIPVKVLDNSGSGSLYGITQGILYAADIDADVINMSLGGGGYNQSMDEAVQTAVAQGTIVVAATGNDGASSISYPAAYSSVIAVGSVTSNRTRSSFSNYGSGLEVMAPGSNIYSTYPNSRYTSLSGTSMATPHVAGVAGLIRAANPDISVAQARQILRDTAQEAGSFTQYGYGIVDAHAAVVAASGGSGG

SEQ ID NO: 71 - DNA, 1239 bp, synthetic construct
  misc_feature 1..1239: note = Variant of serine peptidase from Bacillus sinesaloumensis
  source 1..1239: mol_type = other DNA
atggcagatcaagctagtcaagctaatggaaaccaggacgtcattgaaggcgagctgatcgtttcagtggaaccgaagaacggtaaacctgatgtgagcattcaaagtgcacaatccgtaacagggcaggaagacgtccttaaatcgaaaggctttacgatcgttgataccttgcatgtagaggatagcagcgtcaagccactcgtctcgaagaatttcaataagaaagtggtggagaagatgggactggtgtatcttgttcaatactctccggaccagtttaaaagttccaacattgcgaagaaagaactcagaaaagaattgatggatctgggctttaaagtccgctatataagcgaaaattacaagatgatggcgatcgaaggtacagccactcttcaggcagtacaccctaaccaaaactggcattataatatgattaaagctccggaagcgtgggctattacgtctggatcctctagcgttaaagtagcagtcctggatacagggatcgaccataatcacccatccttggccaacttcgtgaatactaatcttggccggtcgtttgttggaggaaacaccatggatgttcaaggtcatggcacacatgttgctggcacgattgcatcttatgggagtgtaagcggagtgatgcagagtgcgacactgatcccggtcaaagtgctcgataattctggcagcgggtccctttacggtattacgcaaggcatattgtatgccgccgacatcgatgcggacgtcattaacatgtctctgggtggaggaggctataatcagagcatggatgaggctgttaagacagcagttgctcagggaaccattgtagtagcagcgactggcaatgatggtgcatcgtcgatcagttatcctgctgcctacagcagcgtcattgcggtgggatctgtgacgtccaatcgtacacgatcctcgttttctaactatggatctgggcttgaagttatggcaccgggcagcaacatctacagtacgtatcctaattccagatatacatctttgagtggtacaagcatggctactccgcacgttgcgggcgtagctgggctcattcgcgcagccaacccagacatatctgtcgcgcaagcccgtcagattctgcgggataccgcgcaagaagcaggatcgttcacacagtacggctatggaatcgtcgatgctcatgccgccgttgttgctgcatccggtggtagcggcggc

SEQ ID NO: 72 - protein, 413 aa, synthetic construct
  REGION 1..413: note = Variant of serine peptidase from Bacillus sinesaloumensis
MADQASQANGNQDVIEGELIVSVEPKNGKPDVSIQSAQSVTGQEDVLKSKGFTIVDTLHVEDSSVKPLVSKNFNKKVVEKMGLVYLVQYSPDQFKSSNIAKKELRKELMDLGFKVRYISENYKMMAIEGTATLQAVHPNQNWHYNMIKAPEAWAITSGSSSVKVAVLDTGIDHNHPSLANFVNTNLGRSFVGGNTMDVQGHGTHVAGTIASYGSVSGVMQSATLIPVKVLDNSGSGSLYGITQGILYAADIDADVINMSLGGGGYNQSMDEAVKTAVAQGTIVVAATGNDGASSISYPAAYSSVIAVGSVTSNRTRSSFSNYGSGLEVMAPGSNIYSTYPNSRYTSLSGTSMATPHVAGVAGLIRAANPDISVAQARQILRDTAQEAGSFTQYGYGIVDAHAAVVAASGGSGG

SEQ ID NO: 73 - DNA, 1239 bp, synthetic construct
  misc_feature 1..1239: note = Variant of serine peptidase from Bacillus sinesaloumensis
  source 1..1239: mol_type = other DNA
atggcagatcaagctagtcaagctaatggaaaccaggacgtcattgaaggcgagctgatcgtttcagtggaaccgaagaacggtaaacctgatgtgagcattcaaagtgcacaatccgtaacagggcaggaagacgtccttaaatcgaaaggctttacgatcgttgataccttgcatgtagaggatagcagcgtcaagccactcgtctcgaagaatttcaataagaaagtggtggagaagatgggactggtgtatcttgttcaatactctccggaccagtttaaaagttccaacattgcgaagaaagaactcagaaaagaattgatggatctgggctttaaagtccgctatataagcgaaaattacaagatgatggcgatcgaaggtacagccactcttgatgcagtacaccctaaccaaaactggcattataatatgattaaagctccggaagcgtgggctattacgtctggatcctctagcgttaaagtagcagtcctggatacagggatcgaccataatcacccatccttggccaacttcgtgaatactaatcttggccggtcgtttgttggaggaaacaccatggatgttcaaggtcatggcacacatgttgctggcacgattgcatcttatgggagtgtaagcggagtgatgcagagtgcgacactgatcccggtcaaagtgctcgataattctggcagcgggtccctttacggtattacgcaaggcatattgtatgccgccgacatcgatgcggacgtcattaacatgtctctgggtggaggaggctataatcagagcatggatgaggctgttcaaacagcagttgctcagggaaccattgtagtagcagcgactggcaatgatggtgcatcgtcgatcagttatcctgctgcctacagcagcgtcattgcggtgggatctgtgacgtccaatcgtacacgatcctcgttttctaactatggatctgggcttgaagttatggcaccgggcagcaacatctacagtacgtatcctaattccagatatacatctttgagtggtacaagcatggctactccgcacgttgcgggcgtagctgggctcattcgcgcagccaacccagacatatctgtcgcgcaagcccgtcagattctgcgggataccgcgcaagaagcaggatcgttcacacagtacggctatggaatcgtcgatgctcatgccgccgttgttgctgcatccggtggtagcggcggc

SEQ ID NO: 74 - protein, 413 aa, synthetic construct
  REGION 1..413: note = Variant of serine peptidase from Bacillus sinesaloumensis
MADQASQANGNQDVIEGELIVSVEPKNGKPDVSIQSAQSVTGQEDVLKSKGFTIVDTLHVEDSSVKPLVSKNFNKKVVEKMGLVYLVQYSPDQFKSSNIAKKELRKELMDLGFKVRYISENYKMMAIEGTATLDAVHPNQNWHYNMIKAPEAWAITSGSSSVKVAVLDTGIDHNHPSLANFVNTNLGRSFVGGNTMDVQGHGTHVAGTIASYGSVSGVMQSATLIPVKVLDNSGSGSLYGITQGILYAADIDADVINMSLGGGGYNQSMDEAVQTAVAQGTIVVAATGNDGASSISYPAAYSSVIAVGSVTSNRTRSSFSNYGSGLEVMAPGSNIYSTYPNSRYTSLSGTSMATPHVAGVAGLIRAANPDISVAQARQILRDTAQEAGSFTQYGYGIVDAHAAVVAASGGSGG

SEQ ID NO: 75 - DNA, 1239 bp, synthetic construct
  misc_feature 1..1239: note = Variant of serine peptidase from Bacillus sinesaloumensis
  source 1..1239: mol_type = other DNA
atggcagatcaagctagtcaagctaatggaaaccaggacgtcattgaaggcgagctgatcgtttcagtggaaccgaagaacggtaaacctgatgtgagcattcaaagtgcacaatccgtaacagggcaggaagacgtccttaaatcgaaaggctttacgatcgttgataccttgcatgtagaggatagcagcgtcaagccactcgtctcgaagaatttcaataagaaagtggtggagaagatgggactggtgtatcttgttcaatactctccggaccagtttaaaagttccaacattgcgaagaaagaactcagaaaagaattgatggatctgggctttaaagtccgctatataagcgaaaattacaagatgatggcgatcgaaggtacagccactcttgtggcagtacaccctaaccaaaactggcattataatatgattaaagctccggaagcgtgggctattacgtctggatcctctagcgttaaagtagcagtcctggatacagggatcgaccataatcacccatccttggccaacttcgtgaatactaatcttggccggtcgtttgttggaggaaacaccatggatgttcaaggtcatggcacacatgttgctggcacgattgcatcttatgggagtgtaagcggagtgatgcagagtgcgacactgatcccggtcaaagtgctcgataattctggcagcgggtccctttacggtattacgcaaggcatattgtatgccgccgacatcgatgcggacgtcattaacatgtctctgggtggaggaggctataatcagagcatggatgaggctgttcaaacagcagttgctcagggaaccattgtagtagcagcgactggcaatgatggtgcatcgtcgatcagttatcctgctgcctacagcagcgtcattgcggtgggatctgtgacgtccaatcgtacacgatcctcgttttctaactatggatctgggcttgaagttatggcaccgggcagcaacatctacagtacgtatcctaattccagatatacatctttgagtggtacaagcatggctactccgcacgttgcgggcgtagctgggctcattcgcgcagccaacccagacatatctgtcgcgcaagcccgtcagattctgcgggataccgcgcaagaagcaggatcgttcacacagtacggctatggaatcgtcgatgctcatgccgccgttgttgctgcatccggtggtagcggcggc

SEQ ID NO: 76 - protein, 413 aa, synthetic construct
  REGION 1..413: note = Variant of serine peptidase from Bacillus sinesaloumensis
MADQASQANGNQDVIEGELIVSVEPKNGKPDVSIQSAQSVTGQEDVLKSKGFTIVDTLHVEDSSVKPLVSKNFNKKVVEKMGLVYLVQYSPDQFKSSNIAKKELRKELMDLGFKVRYISENYKMMAIEGTATLVAVHPNQNWHYNMIKAPEAWAITSGSSSVKVAVLDTGIDHNHPSLANFVNTNLGRSFVGGNTMDVQGHGTHVAGTIASYGSVSGVMQSATLIPVKVLDNSGSGSLYGITQGILYAADIDADVINMSLGGGGYNQSMDEAVQTAVAQGTIVVAATGNDGASSISYPAAYSSVIAVGSVTSNRTRSSFSNYGSGLEVMAPGSNIYSTYPNSRYTSLSGTSMATPHVAGVAGLIRAANPDISVAQARQILRDTAQEAGSFTQYGYGIVDAHAAVVAASGGSGG

SEQ ID NO: 77 - DNA, 1239 bp, synthetic construct
  misc_feature 1..1239: note = Variant of serine peptidase from Bacillus sinesaloumensis
  source 1..1239: mol_type = other DNA
atggcagatcaagctagtcaagctaatggaaaccaggacgtcattgaaggcgagctgatcgtttcagtggaaccgaagaacggtaaacctgatgtgagcattcaaagtgcacaatccgtaacagggcaggaagacgtccttaaatcgaaaggctttacgatcgttgataccttgcatgtagaggatagcagcgtcaagccactcgtctcgaagaatttcaataagaaagtggtggagaagatgggactggtgtatcttgttcaatactctccggaccagtttaaaagttccaacattgcgaagaaagaactcagaaaagaattgatggatctgggctttaaagtccgctatataagcgaaaattacaagatgatggcgatcattggtacagccactcttcaggcagtacaccctaaccaaaactggcattataatatgattaaagctccggaagcgtgggctattacgtctggatcctctagcgttaaagtagcagtcctggatacagggatcgaccataatcacccatccttggccaacttcgtgaatactaatcttggccggtcgtttgttggaggaaacaccatggatgttcaaggtcatggcacacatgttgctggcacgattgcatcttatgggagtgtaagcggagtgatgcagagtgcgacactgatcccggtcaaagtgctcgataattctggcagcgggtccctttacggtattacgcaaggcatattgtatgccgccgacatcgatgcggacgtcattaacatgtctctgggtggaggaggctataatcagagcatggatgaggctgttcaaacagcagttgctcagggaaccattgtagtagcagcgactggcaatgatggtgcatcgtcgatcagttatcctgctgcctacagcagcgtcattgcggtgggatctgtgacgtccaatcgtacacgatcctcgttttctaactatggatctgggcttgaagttatggcaccgggcagcaacatctacagtacgtatcctaattccagatatacatctttgagtggtacaagcatggctactccgcacgttgcgggcgtagctgggctcattcgcgcagccaacccagacatatctgtcgcgcaagcccgtcagattctgcgggataccgcgcaagaagcaggatcgttcacacagtacggctatggaatcgtcgatgctcatgccgccgttgttgctgcatccggtggtagcggcggc

SEQ ID NO: 78 - protein, 413 aa, synthetic construct
  REGION 1..413: note = Variant of serine peptidase from Bacillus sinesaloumensis
MADQASQANGNQDVIEGELIVSVEPKNGKPDVSIQSAQSVTGQEDVLKSKGFTIVDTLHVEDSSVKPLVSKNFNKKVVEKMGLVYLVQYSPDQFKSSNIAKKELRKELMDLGFKVRYISENYKMMAIIGTATLQAVHPNQNWHYNMIKAPEAWAITSGSSSVKVAVLDTGIDHNHPSLANFVNTNLGRSFVGGNTMDVQGHGTHVAGTIASYGSVSGVMQSATLIPVKVLDNSGSGSLYGITQGILYAADIDADVINMSLGGGGYNQSMDEAVQTAVAQGTIVVAATGNDGASSISYPAAYSSVIAVGSVTSNRTRSSFSNYGSGLEVMAPGSNIYSTYPNSRYTSLSGTSMATPHVAGVAGLIRAANPDISVAQARQILRDTAQEAGSFTQYGYGIVDAHAAVVAASGGSGG

SEQ ID NO: 79 - DNA, 1239 bp, synthetic construct
  misc_feature 1..1239: note = Variant of serine peptidase from Bacillus sinesaloumensis
  source 1..1239: mol_type = other DNA
atggcagatcaagctagtcaagctaatggaaaccaggacgtcattgaaggcgagctgatcgtttcagtggaaccgaagaacggtaaacctgatgtgagcattcaaagtgcacaatccgtaacagggcaggaagacgtccttaaatcgaaaggctttacgatcgttgataccttgcatgtagaggatagcagcgtcaagccactcgtctcgaagaatttcaataagaaagtggtggagaagatgggactggtgtatcttgttcaatactctccggaccagtttaaaagttccaacattgcgaagaaagaactcagaaaagaattgatggatctgggctttaaagtccgctatataagcgaaaattacaagatgatggcgatcgaaggtacagccactcttcaggcagtacaccctaaccaaaactggcattataatatgattaaagctccggaagcgtgggctattacgtctggatcctctagcgttaaagtagcagtcctggatacagggatcgaccataatcacccatccttggccaacttcgtgaatactaatcttggccggtcgtttgttggaggaaacaccatggatgttcaaggtcatggcacacatgttgctggcacgattgcatcttatgggagtgtaagcggagtgatgcagagtgcgacactgatcccggtcaaagtgctcgataattctggcagcgggtccctttacggtattacgcaaggcatattgtatgccgccgacatcgatgcggacgtcattaacatgtctctgggtggaggaggctataatcagagcatggatgaggctgttcaaacagcagttgctcagggaaccattgtagtagcagcgactggcaatgatggtgcatcgtcgatcagttatcctgctgcctacagcagcgtcattgcggtgggatctgtgacgtccaatcgtacacgatcctcgttttctaactatggatctgggcttgaagttatggcaccgggcagcaacatctacagtacgagtcctaattccagatatacatctttgagtggtacaagcatggctactccgcacgttgcgggcgtagctgggctcattcgcgcagccaacccagacatatctgtcgcgcaagcccgtcagattctgcgggataccgcgcaagaagcaggatcgttcacacagtacggctatggaatcgtcgatgctcatgccgccgttgttgctgcatccggtggtagcggcggc

SEQ ID NO: 80 - protein, 413 aa, synthetic construct
  REGION 1..413: note = Variant of serine peptidase from Bacillus sinesaloumensis
MADQASQANGNQDVIEGELIVSVEPKNGKPDVSIQSAQSVTGQEDVLKSKGFTIVDTLHVEDSSVKPLVSKNFNKKVVEKMGLVYLVQYSPDQFKSSNIAKKELRKELMDLGFKVRYISENYKMMAIEGTATLQAVHPNQNWHYNMIKAPEAWAITSGSSSVKVAVLDTGIDHNHPSLANFVNTNLGRSFVGGNTMDVQGHGTHVAGTIASYGSVSGVMQSATLIPVKVLDNSGSGSLYGITQGILYAADIDADVINMSLGGGGYNQSMDEAVQTAVAQGTIVVAATGNDGASSISYPAAYSSVIAVGSVTSNRTRSSFSNYGSGLEVMAPGSNIYSTSPNSRYTSLSGTSMATPHVAGVAGLIRAANPDISVAQARQILRDTAQEAGSFTQYGYGIVDAHAAVVAASGGSGG

SEQ ID NO: 81 - DNA, 1239 bp, synthetic construct
  misc_feature 1..1239: note = Variant of serine peptidase from Bacillus sinesaloumensis
  source 1..1239: mol_type = other DNA
atggcagatcaagctagtcaagctaatggaaaccaggacgtcattgaaggcgagctgatcgtttcagtggaaccgaagaacggtaaacctgatgtgagcattcaaagtgcacaatccgtaacagggcaggaagacgtccttaaatcgaaaggctttacgatcgttgataccttgcatgtagaggatagcagcgtcaagccactcgtctcgaagaatttcaataagaaagtggtggagaagatgggactggtgtatcttgttcaatactctccggaccagtttaaaagttccaacattgcgaagaaagaactcagaaaagaattgatggatctgggctttaaagtccgctatataagcgaaaattacaagatgatggcgatcgaaggtacagccactcttcaggcagtacaccctaaccaaaactggcattataatatgattaaagctccggaagcgtgggctattacgtctggatcctctagcgttaaagtagcagtcctggatacagggatcgaccataatcacccatccttggccaacttcgtgaatactaatcttggccggtcgtttgttggaggaaacaccatggatgttcaaggtcatggcacacatgttgctggcacgattgcatcttatgggagtgtaagcggagtgatgcagagtgcgacactgatcccggtcaaagtgctcgataattctggcagcgggtccctttacggtattacgcaaggcatattgtatgccgccgacatcgatgcggacgtcattaacatgtctctgggtggaggaggctataatcagagcatggatgaggctgttcaaacagcagttgctcagggaaccattgtagtagcagcgactggcaatgatggtgcatcgtcgatcagttatcctgctgcctacagcagcgtcattgcggtgggatctgtgacgtccgctcgtacacgatcctcgttttctaactatggatctgggcttgaagttatggcaccgggcagcaacatctacagtacgtatcctaattccagatatacatctttgagtggtacaagcatggctactccgcacgttgcgggcgtagctgggctcattcgcgcagccaacccagacatatctgtcgcgcaagcccgtcagattctgcgggataccgcgcaagaagcaggatcgttcacacagtacggctatggaatcgtcgatgctcatgccgccgttgttgctgcatccggtggtagcggcggc

SEQ ID NO: 82 - protein, 413 aa, synthetic construct
  REGION 1..413: note = Variant of serine peptidase from Bacillus sinesaloumensis
MADQASQANGNQDVIEGELIVSVEPKNGKPDVSIQSAQSVTGQEDVLKSKGFTIVDTLHVEDSSVKPLVSKNFNKKVVEKMGLVYLVQYSPDQFKSSNIAKKELRKELMDLGFKVRYISENYKMMAIEGTATLQAVHPNQNWHYNMIKAPEAWAITSGSSSVKVAVLDTGIDHNHPSLANFVNTNLGRSFVGGNTMDVQGHGTHVAGTIASYGSVSGVMQSATLIPVKVLDNSGSGSLYGITQGILYAADIDADVINMSLGGGGYNQSMDEAVQTAVAQGTIVVAATGNDGASSISYPAAYSSVIAVGSVTSARTRSSFSNYGSGLEVMAPGSNIYSTYPNSRYTSLSGTSMATPHVAGVAGLIRAANPDISVAQARQILRDTAQEAGSFTQYGYGIVDAHAAVVAASGGSGG

SEQ ID NO: 83 - DNA, 1239 bp, synthetic construct
  misc_feature 1..1239: note = Variant of serine peptidase from Bacillus sinesaloumensis
  source 1..1239: mol_type = other DNA
atggcagatcaagctagtcaagctaatggaaaccaggacgtcattgaaggcgagctgatcgtttcagtggaaccgaagaacggtaaacctgatgtgagcattcaaagtgcacaatccgtaacagggcaggaagacgtccttaaatcgaaaggctttacgatcgttgataccttgcatgtagaggatagcagcgtcaagccactcgtctcgaagaatttcaataagaaagtggtggagaagatgggactggtgtatcttgttcaatactctccggaccagtttaaaagttccaacattgcgaagaaagaactcagaaaagaattgatggatctgggctttaaagtccgctatataagcgaaaattacaagatgatggcgatcgaaggtacagagactcttcaggcagtacaccctaaccaaaactggcattataatatgattaaagctccggaagcgtgggctattacgtctggatcctctagcgttaaagtagcagtcctggatacagggatcgaccataatcacccatccttggccaacttcgtgaatactaatcttggccggtcgtttgttggaggaaacaccatggatgttcaaggtcatggcacacatgttgctggcacgattgcatcttatgggagtgtaagcggagtgatgcagagtgcgacactgatcccggtcaaagtgctcgataattctggcagcgggtccctttacggtattacgcaaggcatattgtatgccgccgacatcgatgcggacgtcattaacatgtctctgggtggaggaggctataatcagagcatggatgaggctgttcaaacagcagttgctcagggaaccattgtagtagcagcgactggcaatgatggtgcatcgtcgatcagttatcctgctgcctacagcagcgtcattgcggtgggatctgtgacgtccaatcgtacacgatcctcgttttctaactatggatctgggcttgaagttatggcaccgggcagcaacatctacagtacgtatcctaattccagatatacatctttgagtggtacaagcatggctactccgcacgttgcgggcgtagctgggctcattcgcgcagccaacccagacatatctgtcgcgcaagcccgtcagattctgcgggataccgcgcaagaagcaggatcgttcacacagtacggctatggaatcgtcgatgctcatgccgccgttgttgctgcatccggtggtagcggcggc

SEQ ID NO: 84 - protein, 413 aa, synthetic construct
  REGION 1..413: note = Variant of serine peptidase from Bacillus sinesaloumensis
MADQASQANGNQDVIEGELIVSVEPKNGKPDVSIQSAQSVTGQEDVLKSKGFTIVDTLHVEDSSVKPLVSKNFNKKVVEKMGLVYLVQYSPDQFKSSNIAKKELRKELMDLGFKVRYISENYKMMAIEGTETLQAVHPNQNWHYNMIKAPEAWAITSGSSSVKVAVLDTGIDHNHPSLANFVNTNLGRSFVGGNTMDVQGHGTHVAGTIASYGSVSGVMQSATLIPVKVLDNSGSGSLYGITQGILYAADIDADVINMSLGGGGYNQSMDEAVQTAVAQGTIVVAATGNDGASSISYPAAYSSVIAVGSVTSNRTRSSFSNYGSGLEVMAPGSNIYSTYPNSRYTSLSGTSMATPHVAGVAGLIRAANPDISVAQARQILRDTAQEAGSFTQYGYGIVDAHAAVVAASGGSGG

SEQ ID NO: 85 - DNA, 1239 bp, synthetic construct
  misc_feature 1..1239: note = Variant of serine peptidase from Bacillus sinesaloumensis
  source 1..1239: mol_type = other DNA
atggcagatcaagctagtcaagctaatggaaaccaggacgtcattgaaggcgagctgatcgtttcagtggaaccgaagaacggtaaacctgatgtgagcattcaaagtgcacaatccgtaacagggcaggaagacgtccttaaatcgaaaggctttacgatcgttgataccttgcatgtagaggatagcagcgtcaagccactcgtctcgaagaatttcaataagaaagtggtggagaagatgggactggtgtatcttgttcaatactctccggaccagtttaaaagttccaacattgcgaagaaagaactcagaaaagaattgatggatctgggctttaaagtccgctatataagcgaaaattacaagatgatggcgatcgaaggtacagccactcttcaggcagtacaccctaaccaaaactggcattataatatgattaaagctccggaagcgtgggctattacgtctggatcctctagcgttaaagtagcagtcctggatacagggatcgaccataatcacccatccttggccaacttcgtgaatactccgcttggccggtcgtttgttggaggaaacaccatggatgttcaaggtcatggcacacatgttgctggcacgattgcatcttatgggagtgtaagcggagtgatgcagagtgcgacactgatcccggtcaaagtgctcgataattctggcagcgggtccctttacggtattacgcaaggcatattgtatgccgccgacatcgatgcggacgtcattaacatgtctctgggtggaggaggctataatcagagcatggatgaggctgttcaaacagcagttgctcagggaaccattgtagtagcagcgactggcaatgatggtgcatcgtcgatcagttatcctgctgcctacagcagcgtcattgcggtgggatctgtgacgtccaatcgtacacgatcctcgttttctaactatggatctgggcttgaagttatggcaccgggcagcaacatctacagtacgtatcctaattccagatatacatctttgagtggtacaagcatggctactccgcacgttgcgggcgtagctgggctcattcgcgcagccaacccagacatatctgtcgcgcaagcccgtcagattctgcgggataccgcgcaagaagcaggatcgttcacacagtacggctatggaatcgtcgatgctcatgccgccgttgttgctgcatccggtggtagcggcggc

SEQ ID NO: 86 - protein, 413 aa, synthetic construct
  REGION 1..413: note = Variant of serine peptidase from Bacillus sinesaloumensis
MADQASQANGNQDVIEGELIVSVEPKNGKPDVSIQSAQSVTGQEDVLKSKGFTIVDTLHVEDSSVKPLVSKNFNKKVVEKMGLVYLVQYSPDQFKSSNIAKKELRKELMDLGFKVRYISENYKMMAIEGTATLQAVHPNQNWHYNMIKAPEAWAITSGSSSVKVAVLDTGIDHNHPSLANFVNTPLGRSFVGGNTMDVQGHGTHVAGTIASYGSVSGVMQSATLIPVKVLDNSGSGSLYGITQGILYAADIDADVINMSLGGGGYNQSMDEAVQTAVAQGTIVVAATGNDGASSISYPAAYSSVIAVGSVTSNRTRSSFSNYGSGLEVMAPGSNIYSTYPNSRYTSLSGTSMATPHVAGVAGLIRAANPDISVAQARQILRDTAQEAGSFTQYGYGIVDAHAAVVAASGGSGG

SEQ ID NO: 87 - DNA, 1239 bp, synthetic construct
  misc_feature 1..1239: note = Variant of serine peptidase from Bacillus sinesaloumensis
  source 1..1239: mol_type = other DNA
atggcagatcaagctagtcaagctaatggaaaccaggacgtcattgaaggcgagctgatcgtttcagtggaaccgaagaacggtaaacctgatgtgagcattcaaagtgcacaatccgtaacagggcaggaagacgtccttaaatcgaaaggctttacgatcgttgataccttgcatgtagaggatagcagcgtcaagccactcgtctcgaagaatttcaataagaaagtggtggagaagatgggactggtgtatcttgttcaatactctccggaccagtttaaaagttccaacattgcgaagaaagaactcagaaaagaattgatggatctgggctttaaagtccgctatataagcgaaaattacaagatgatggcgatcgaaggtacagccactcttcaggcagtacaccctaaccaaaactggcattataatatgattaaagctccggaagcgtgggctattacgtctggatcctctagcgttaaagtagcagtcctggatacagggatcgaccataatcacccatccttggccaacttcgtgaatactaatcttggccggtcgtttgttggaggaaacaccatggatgttcaaggtcatggcacacatgttgctggcacgattgcatcttatgggagtgtaagcggagtgatgcagagtgcgacactgatcccggtcaaagtgctcgataattctggcagcgggtccctttacggtattacgcaaggcatattgtatgccgccgacatcgatgcggacgtcattaacatgtctctgggtggaggaggctataatcagagcatggatgaggctgttcaaacagcagttgctcagggaaccattgtagtagcagcgactggcaatgatggtgcatcgtcgatcagttatcctgctgcctacagcagcgtcattgcggtgggatctgtgacgtccaatcgtacacgatcctcgttttctaactatggatctgggcttgaagttatggcaccgggcagcaacatctacagtacgtatcctaattccagatatacatctttgagtggtacaagcatggctactccgcacgttgcgggcgtagctgggctcattcgcgcagccaacccagacatatctgtctggcaagcccgtcagattctgcgggataccgcgcaagaagcaggatcgttcacacagtacggctatggaatcgtcgatgctcatgccgccgttgttgctgcatccggtggtagcggcggc

SEQ ID NO: 88 - protein, 413 aa, synthetic construct
  REGION 1..413: note = Variant of serine peptidase from Bacillus sinesaloumensis
MADQASQANGNQDVIEGELIVSVEPKNGKPDVSIQSAQSVTGQEDVLKSKGFTIVDTLHVEDSSVKPLVSKNFNKKVVEKMGLVYLVQYSPDQFKSSNIAKKELRKELMDLGFKVRYISENYKMMAIEGTATLQAVHPNQNWHYNMIKAPEAWAITSGSSSVKVAVLDTGIDHNHPSLANFVNTNLGRSFVGGNTMDVQGHGTHVAGTIASYGSVSGVMQSATLIPVKVLDNSGSGSLYGITQGILYAADIDADVINMSLGGGGYNQSMDEAVQTAVAQGTIVVAATGNDGASSISYPAAYSSVIAVGSVTSNRTRSSFSNYGSGLEVMAPGSNIYSTYPNSRYTSLSGTSMATPHVAGVAGLIRAANPDISVWQARQILRDTAQEAGSFTQYGYGIVDAHAAVVAASGGSGG

SEQ ID NO: 89 - DNA, 1239 bp, synthetic construct
  misc_feature 1..1239: note = Variant of serine peptidase from Bacillus sinesaloumensis
  source 1..1239: mol_type = other DNA
atggcagatcaagctagtcaagctaatggaaaccaggacgtcattgaaggcgagctgatcgtttcagtggaaccgaagaacggtaaacctgatgtgagcattcaaagtgcacaatccgtaacagggcaggaagacgtccttaaatcgaaaggctttacgatcgttgataccttgcatgtagaggatagcagcgtcaagccactcgtctcgaagaatttcaataagaaagtggtggagaagatgggactggtgtatcttgttcaatactctccggaccagtttaaaagttccaacattgcgaagaaagaactcagaaaagaattgatggatctgggctttaaagtccgctatataagcgaaaattacaagatgatggcgatcgaaggtacagccactcttcaggcagtacaccctaaccaaaactggcattataatatgattaaagctccggaagcgtgggctattacgtctggatcctctagcgttaaagtagcagtcctggatacagggatcgaccataatcacccatccttggccaacttcgtgaatactaatcttggccggtcgtttgttggaggaaacaccatggatgttcaaggtcatggcacacatgttgctggcacgattgcatcttatgggagtgtaagcggagtgatgcagagtgcgacactgatcccggtcaaagtgctcgataattctggcagcgggtccctttacggtattacgcaaggcatattgtatgccgccgacatcgatgcggacgtcattaacatgtctctgggtggaggaggctataatcagagcatggatgaggctgttcaaacagcagttgctcagggaaccattgtagtagcagcgactggcaatgatggtgcatcgtcgatcagttatcctgctgcctacagcagcgtcattgcggtgggatctgtgacgtccaatggtacacgatcctcgttttctaactatggatctgggcttgaagttatggcaccgggcagcaacatctacagtacgtatcctaattccagatatacatctttgagtggtacaagcatggctactccgcacgttgcgggcgtagctgggctcattcgcgcagccaacccagacatatctgtcgcgcaagcccgtcagattctgcgggataccgcgcaagaagcaggatcgttcacacagtacggctatggaatcgtcgatgctcatgccgccgttgttgctgcatccggtggtagcggcggc

SEQ ID NO: 90 - protein, 413 aa, synthetic construct
  REGION 1..413: note = Variant of serine peptidase from Bacillus sinesaloumensis
MADQASQANGNQDVIEGELIVSVEPKNGKPDVSIQSAQSVTGQEDVLKSKGFTIVDTLHVEDSSVKPLVSKNFNKKVVEKMGLVYLVQYSPDQFKSSNIAKKELRKELMDLGFKVRYISENYKMMAIEGTATLQAVHPNQNWHYNMIKAPEAWAITSGSSSVKVAVLDTGIDHNHPSLANFVNTNLGRSFVGGNTMDVQGHGTHVAGTIASYGSVSGVMQSATLIPVKVLDNSGSGSLYGITQGILYAADIDADVINMSLGGGGYNQSMDEAVQTAVAQGTIVVAATGNDGASSISYPAAYSSVIAVGSVTSNGTRSSFSNYGSGLEVMAPGSNIYSTYPNSRYTSLSGTSMATPHVAGVAGLIRAANPDISVAQARQILRDTAQEAGSFTQYGYGIVDAHAAVVAASGGSGG

SEQ ID NO: 91 - DNA, 1239 bp, synthetic construct
  misc_feature 1..1239: note = Variant of serine peptidase from Bacillus sinesaloumensis
  source 1..1239: mol_type = other DNA
atggcagatcaagctagtcaagctaatggaaaccaggacgtcattgaaggcgagctgatcgtttcagtggaaccgaagaacggtaaacctgatgtgagcattcaaagtgcacaatccgtaacagggcaggaagacgtccttaaatcgaaaggctttacgatcgttgataccttgcatgtagaggatagcagcgtcaagccactcgtctcgaagaatttcaataagaaagtggtggagaagatgggactggtgtatcttgttcaatactctccggaccagtttaaaagttccaacattgcgaagaaagaactcagaaaagaattgatggatctgggctttaaagtccgctatataagcgaaaattacaagatgatggcgatcgaaggtacagccactcttcaggcagtacaccctaaccaaaactggcattataatatgattaaagctccggaagcgtgggctattacgtctggatcctctagcgttaaagtagcagtcctggatacagggatcgaccataatcacccatccttggccaacttcgtgaatactaatcttggccggtcgtttcgtggaggaaacaccatggatgttcaaggtcatggcacacatgttgctggcacgattgcatcttatgggagtgtaagcggagtgatgcagagtgcgacactgatcccggtcaaagtgctcgataattctggcagcgggtccctttacggtattacgcaaggcatattgtatgccgccgacatcgatgcggacgtcattaacatgtctctgggtggaggaggctataatcagagcatggatgaggctgttcaaacagcagttgctcagggaaccattgtagtagcagcgactggcaatgatggtgcatcgtcgatcagttatcctgctgcctacagcagcgtcattgcggtgggatctgtgacgtccaatcgtacacgatcctcgttttctaactatggatctgggcttgaagttatggcaccgggcagcaacatctacagtacgtatcctaattccagatatacatctttgagtggtacaagcatggctactccgcacgttgcgggcgtagctgggctcattcgcgcagccaacccagacatatctgtcgcgcaagcccgtcagattctgcgggataccgcgcaagaagcaggatcgttcacacagtacggctatggaatcgtcgatgctcatgccgccgttgttgctgcatccggtggtagcggcggc

SEQ ID NO: 92 - protein, 413 aa, synthetic construct
  REGION 1..413: note = Variant of serine peptidase from Bacillus sinesaloumensis
MADQASQANGNQDVIEGELIVSVEPKNGKPDVSIQSAQSVTGQEDVLKSKGFTIVDTLHVEDSSVKPLVSKNFNKKVVEKMGLVYLVQYSPDQFKSSNIAKKELRKELMDLGFKVRYISENYKMMAIEGTATLQAVHPNQNWHYNMIKAPEAWAITSGSSSVKVAVLDTGIDHNHPSLANFVNTNLGRSFRGGNTMDVQGHGTHVAGTIASYGSVSGVMQSATLIPVKVLDNSGSGSLYGITQGILYAADIDADVINMSLGGGGYNQSMDEAVQTAVAQGTIVVAATGNDGASSISYPAAYSSVIAVGSVTSNRTRSSFSNYGSGLEVMAPGSNIYSTYPNSRYTSLSGTSMATPHVAGVAGLIRAANPDISVAQARQILRDTAQEAGSFTQYGYGIVDAHAAVVAASGGSGG

SEQ ID NO: 93 - DNA, 1239 bp, synthetic construct
  misc_feature 1..1239: note = Variant of serine peptidase from Bacillus sinesaloumensis
  source 1..1239: mol_type = other DNA
atggcagatcaagctagtcaagctaatggaaaccaggacgtcattgaaggcgagctgatcgtttcagtggaaccgaagaacggtaaacctgatgtgagcattcaaagtgcacaatccgtaacagggcaggaagacgtccttaaatcgaaaggctttacgatcgttgataccttgcatgtagaggatagcagcgtcaagccactcgtctcgaagaatttcaataagaaagtggtggagaagatgggactggtgtatcttgttcaatactctccggaccagtttaaaagttccaacattgcgaagaaagaactcagaaaagaattgatggatctgggctttaaagtccgctatataagcgaaaattacaagatgatggcgatcgtgggtacagccactcttcaggcagtacaccctaaccaaaactggcattataatatgattaaagctccggaagcgtgggctattacgtctggatcctctagcgttaaagtagcagtcctggatacagggatcgaccataatcacccatccttggccaacttcgtgaatactaatcttggccggtcgtttgttggaggaaacaccatggatgttcaaggtcatggcacacatgttgctggcacgattgcatcttatgggagtgtaagcggagtgatgcagagtgcgacactgatcccggtcaaagtgctcgataattctggcagcgggtccctttacggtattacgcaaggcatattgtatgccgccgacatcgatgcggacgtcattaacatgtctctgggtggaggaggctataatcagagcatggatgaggctgttcaaacagcagttgctcagggaaccattgtagtagcagcgactggcaatgatggtgcatcgtcgatcagttatcctgctgcctacagcagcgtcattgcggtgggatctgtgacgtccaatcgtacacgatcctcgttttctaactatggatctgggcttgaagttatggcaccgggcagcaacatctacagtacgtatcctaattccagatatacatctttgagtggtacaagcatggctactccgcacgttgcgggcgtagctgggctcattcgcgcagccaacccagacatatctgtcgcgcaagcccgtcagattctgcgggataccgcgcaagaagcaggatcgttcacacagtacggctatggaatcgtcgatgctcatgccgccgttgttgctgcatccggtggtagcggcggc

SEQ ID NO: 94 - protein, 413 aa, synthetic construct
  REGION 1..413: note = Variant of serine peptidase from Bacillus sinesaloumensis
MADQASQANGNQDVIEGELIVSVEPKNGKPDVSIQSAQSVTGQEDVLKSKGFTIVDTLHVEDSSVKPLVSKNFNKKVVEKMGLVYLVQYSPDQFKSSNIAKKELRKELMDLGFKVRYISENYKMMAIVGTATLQAVHPNQNWHYNMIKAPEAWAITSGSSSVKVAVLDTGIDHNHPSLANFVNTNLGRSFVGGNTMDVQGHGTHVAGTIASYGSVSGVMQSATLIPVKVLDNSGSGSLYGITQGILYAADIDADVINMSLGGGGYNQSMDEAVQTAVAQGTIVVAATGNDGASSISYPAAYSSVIAVGSVTSNRTRSSFSNYGSGLEVMAPGSNIYSTYPNSRYTSLSGTSMATPHVAGVAGLIRAANPDISVAQARQILRDTAQEAGSFTQYGYGIVDAHAAVVAASGGSGG

SEQ ID NO: 95 - DNA, 1239 bp, synthetic construct
  misc_feature 1..1239: note = Variant of serine peptidase from Bacillus sinesaloumensis
  source 1..1239: mol_type = other DNA
atggcagatcaagctagtcaagctaatggaaaccaggacgtcattgaaggcgagctgatcgtttcagtggaaccgaagaacggtaaacctgatgtgagcattcaaagtgcacaatccgtaacagggcaggaagacgtccttaaatcgaaaggctttacgatcgttgataccttgcatgtagaggatagcagcgtcaagccactcgtctcgaagaatttcaataagaaagtggtggagaagatgggactggtgtatcttgttcaatactctccggaccagtttaaaagttccaacattgcgaagaaagaactcagaaaagaattgatggatctgggctttaaagtccgctatataagcgaaaattacaagatgatggcgatcgaaggtacagccgagcttcaggcagtacaccctaaccaaaactggcattataatatgattaaagctccggaagcgtgggctattacgtctggatcctctagcgttaaagtagcagtcctggatacagggatcgaccataatcacccatccttggccaacttcgtgaatactaatcttggccggtcgtttgttggaggaaacaccatggatgttcaaggtcatggcacacatgttgctggcacgattgcatcttatgggagtgtaagcggagtgatgcagagtgcgacactgatcccggtcaaagtgctcgataattctggcagcgggtccctttacggtattacgcaaggcatattgtatgccgccgacatcgatgcggacgtcattaacatgtctctgggtggaggaggctataatcagagcatggatgaggctgttcaaacagcagttgctcagggaaccattgtagtagcagcgactggcaatgatggtgcatcgtcgatcagttatcctgctgcctacagcagcgtcattgcggtgggatctgtgacgtccaatcgtacacgatcctcgttttctaactatggatctgggcttgaagttatggcaccgggcagcaacatctacagtacgtatcctaattccagatatacatctttgagtggtacaagcatggctactccgcacgttgcgggcgtagctgggctcattcgcgcagccaacccagacatatctgtcgcgcaagcccgtcagattctgcgggataccgcgcaagaagcaggatcgttcacacagtacggctatggaatcgtcgatgctcatgccgccgttgttgctgcatccggtggtagcggcggc

SEQ ID NO: 96 - protein, 413 aa, synthetic construct
  REGION 1..413: note = Variant of serine peptidase from Bacillus sinesaloumensis
MADQASQANGNQDVIEGELIVSVEPKNGKPDVSIQSAQSVTGQEDVLKSKGFTIVDTLHVEDSSVKPLVSKNFNKKVVEKMGLVYLVQYSPDQFKSSNIAKKELRKELMDLGFKVRYISENYKMMAIEGTAELQAVHPNQNWHYNMIKAPEAWAITSGSSSVKVAVLDTGIDHNHPSLANFVNTNLGRSFVGGNTMDVQGHGTHVAGTIASYGSVSGVMQSATLIPVKVLDNSGSGSLYGITQGILYAADIDADVINMSLGGGGYNQSMDEAVQTAVAQGTIVVAATGNDGASSISYPAAYSSVIAVGSVTSNRTRSSFSNYGSGLEVMAPGSNIYSTYPNSRYTSLSGTSMATPHVAGVAGLIRAANPDISVAQARQILRDTAQEAGSFTQYGYGIVDAHAAVVAASGGSGG

SEQ ID NO: 97 - DNA, 1239 bp, synthetic construct
  misc_feature 1..1239: note = Variant of serine peptidase from Bacillus sinesaloumensis
  source 1..1239: mol_type = other DNA
atggcagatcaagctagtcaagctaatggaaaccaggacgtcattgaaggcgagctgatcgtttcagtggaaccgaagaacggtaaacctgatgtgagcattcaaagtgcacaatccgtaacagggcaggaagacgtccttaaatcgaaaggctttacgatcgttgataccttgcatgtagaggatagcagcgtcaagccactcgtctcgaagaatttcaataagaaagtggtggagaagatgggactggtgtatcttgttcaatactctccggaccagtttaaaagttccaacattgcgaagaaagaactcagaaaagaattgatggatctgggctttaaagtccgctatataagcgaaaattacaagatgatggcgatcgaaggtacagccactcttcaggcagtacaccctaaccaaaactggcattataatatgattaaagctccggaagcgtgggctattacgtctggatcctctagcgttaaagtagcagtcctggatacagggatcgaccataatcacccatccttggccaacttcgtgaatactaatcttggccggtcgtttgttggaggaaacaccatggatgttcaaggtcatggcacacatgttgctggcacgattgcatcttatgggagtgtaagcggagtgatgcagagtgcgacactgatcccggtcaaagtgctcgataattctggcagcgggtccctttacggtattacgcaaggcatattgtatgccgccgacatcgatgcggacgtcattaacatgtctctgggtggaggaggctataatcagagcatggatgaggctgttcaaacagcagttgctcagggaaccattgtagtagcagcgactggcaatgatggtgcatcgtcgatcagttatcctgctgcctacagcagcgtcattgcggtgggatctgtgacgtccaatcgtacacgatcctcgttttctaactatggacgggggcttgaagttatggcaccgggcagcaacatctacagtacgtatcctaattccagatatacatctttgagtggtacaagcatggctactccgcacgttgcgggcgtagctgggctcattcgcgcagccaacccagacatatctgtcgcgcaagcccgtcagattctgcgggataccgcgcaagaagcaggatcgttcacacagtacggctatggaatcgtcgatgctcatgccgccgttgttgctgcatccggtggtagcggcggc

SEQ ID NO: 98 - protein, 413 aa, synthetic construct
  REGION 1..413: note = Variant of serine peptidase from Bacillus sinesaloumensis
MADQASQANGNQDVIEGELIVSVEPKNGKPDVSIQSAQSVTGQEDVLKSKGFTIVDTLHVEDSSVKPLVSKNFNKKVVEKMGLVYLVQYSPDQFKSSNIAKKELRKELMDLGFKVRYISENYKMMAIEGTATLQAVHPNQNWHYNMIKAPEAWAITSGSSSVKVAVLDTGIDHNHPSLANFVNTNLGRSFVGGNTMDVQGHGTHVAGTIASYGSVSGVMQSATLIPVKVLDNSGSGSLYGITQGILYAADIDADVINMSLGGGGYNQSMDEAVQTAVAQGTIVVAATGNDGASSISYPAAYSSVIAVGSVTSNRTRSSFSNYGRGLEVMAPGSNIYSTYPNSRYTSLSGTSMATPHVAGVAGLIRAANPDISVAQARQILRDTAQEAGSFTQYGYGIVDAHAAVVAASGGSGG

SEQ ID NO: 99 - DNA, 1239 bp, synthetic construct
  misc_feature 1..1239: note = Variant of serine peptidase from Bacillus sinesaloumensis
  source 1..1239: mol_type = other DNA
atggcagatcaagctagtcaagctaatggaaaccaggacgtcattgaaggcgagctgatcgtttcagtggaaccgaagaacggtaaacctgatgtgagcattcaaagtgcacaatccgtaacagggcaggaagacgtccttaaatcgaaaggctttacgatcgttgataccttgcatgtagaggatagcagcgtcaagccactcgtctcgaagaatttcaataagaaagtggtggagaagatgggactggtgtatcttgttcaatactctccggaccagtttaaaagttccaacattgcgaagaaagaactcagaaaagaattgatggatctgggctttaaagtccgctatataagcgaaaattacaagatgatggcgatcgaaggtacagccactcttcaggcagtacaccctaaccaaaactggcattataatatgattaaagctccggaagcgtgggctattacgtctggatcctctagcgttaaagtagcagtcctggatacagggatcgaccataatcacccatccttggccaacttcgtgaatactaatcttggccggtcgtttgttggaggaaacaccatggatgttcaaggtcatggcacacatgttgctggcacgattgcatcttatgggagtgtaagcggagtgatgcagagtgcgacactgatcccggtcaaagtgctcgataattctggcagcgggtccctttacggtattacgcaaggcatattgtatgccgccgacatcgatgcggacgtcattaacatgtctctgggtggaggaggctataatcagagcatggatgaggctgttcaaacagcagttgctcagggaaccattgtagtagcagcgactggcaatgatggtgcatcgtcgatcagttatcctgctgcctacagcagcgtcattgcggtgggatctgtgacgtccaatcgtatgcgatcctcgttttctaactatggatctgggcttgaagttatggcaccgggcagcaacatctacagtacgtatcctaattccagatatacatctttgagtggtacaagcatggctactccgcacgttgcgggcgtagctgggctcattcgcgcagccaacccagacatatctgtcgcgcaagcccgtcagattctgcgggataccgcgcaagaagcaggatcgttcacacagtacggctatggaatcgtcgatgctcatgccgccgttgttgctgcatccggtggtagcggcggc

SEQ ID NO: 100 - protein, 413 aa, synthetic construct
  REGION 1..413: note = Variant of serine peptidase from Bacillus sinesaloumensis
MADQASQANGNQDVIEGELIVSVEPKNGKPDVSIQSAQSVTGQEDVLKSKGFTIVDTLHVEDSSVKPLVSKNFNKKVVEKMGLVYLVQYSPDQFKSSNIAKKELRKELMDLGFKVRYISENYKMMAIEGTATLQAVHPNQNWHYNMIKAPEAWAITSGSSSVKVAVLDTGIDHNHPSLANFVNTNLGRSFVGGNTMDVQGHGTHVAGTIASYGSVSGVMQSATLIPVKVLDNSGSGSLYGITQGILYAADIDADVINMSLGGGGYNQSMDEAVQTAVAQGTIVVAATGNDGASSISYPAAYSSVIAVGSVTSNRMRSSFSNYGSGLEVMAPGSNIYSTYPNSRYTSLSGTSMATPHVAGVAGLIRAANPDISVAQARQILRDTAQEAGSFTQYGYGIVDAHAAVVAASGGSGG

SEQ ID NO: 101 - DNA, 1239 bp, synthetic construct
  misc_feature 1..1239: note = Variant of serine peptidase from Bacillus sinesaloumensis
  source 1..1239: mol_type = other DNA
atggcagatcaagctagtcaagctaatggaaaccaggacgtcattgaaggcgagctgatcgtttcagtggaaccgaagaacggtaaacctgatgtgagcattcaaagtgcacaatccgtaacagggcaggaagacgtccttaaatcgaaaggctttacgatcgttgataccttgcatgtagaggatagcagcgtcaagccactcgtctcgaagaatttcaataagaaagtggtggagaagatgggactggtgtatcttgttcaatactctccggaccagtttaaaagttccaacattgcgaagaaagaactcagaaaagaattgatggatctgggctttaaagtccgctatataagcgaaaattacaagatgatggcgatcgaaggtacagccgttcttcaggcagtacaccctaaccaaaactggcattataatatgattaaagctccggaagcgtgggctattacgtctggatcctctagcgttaaagtagcagtcctggatacagggatcgaccataatcacccatccttggccaacttcgtgaatactaatcttggccggtcgtttgttggaggaaacaccatggatgttcaaggtcatggcacacatgttgctggcacgattgcatcttatgggagtgtaagcggagtgatgcagagtgcgacactgatcccggtcaaagtgctcgataattctggcagcgggtccctttacggtattacgcaaggcatattgtatgccgccgacatcgatgcggacgtcattaacatgtctctgggtggaggaggctataatcagagcatggatgaggctgttcaaacagcagttgctcagggaaccattgtagtagcagcgactggcaatgatggtgcatcgtcgatcagttatcctgctgcctacagcagcgtcattgcggtgggatctgtgacgtccaatcgtacacgatcctcgttttctaactatggatctgggcttgaagttatggcaccgggcagcaacatctacagtacgtatcctaattccagatatacatctttgagtggtacaagcatggctactccgcacgttgcgggcgtagctgggctcattcgcgcagccaacccagacatatctgtcgcgcaagcccgtcagattctgcgggataccgcgcaagaagcaggatcgttcacacagtacggctatggaatcgtcgatgctcatgccgccgttgttgctgcatccggtggtagcggcggc

SEQ ID NO: 102 - protein, 413 aa, synthetic construct
  REGION 1..413: note = Variant of serine peptidase from Bacillus sinesaloumensis
MADQASQANGNQDVIEGELIVSVEPKNGKPDVSIQSAQSVTGQEDVLKSKGFTIVDTLHVEDSSVKPLVSKNFNKKVVEKMGLVYLVQYSPDQFKSSNIAKKELRKELMDLGFKVRYISENYKMMAIEGTAVLQAVHPNQNWHYNMIKAPEAWAITSGSSSVKVAVLDTGIDHNHPSLANFVNTNLGRSFVGGNTMDVQGHGTHVAGTIASYGSVSGVMQSATLIPVKVLDNSGSGSLYGITQGILYAADIDADVINMSLGGGGYNQSMDEAVQTAVAQGTIVVAATGNDGASSISYPAAYSSVIAVGSVTSNRTRSSFSNYGSGLEVMAPGSNIYSTYPNSRYTSLSGTSMATPHVAGVAGLIRAANPDISVAQARQILRDTAQEAGSFTQYGYGIVDAHAAVVAASGGSGG

SEQ ID NO: 103 - DNA, 1239 bp, synthetic construct
  misc_feature 1..1239: note = Variant of serine peptidase from Bacillus sinesaloumensis
  source 1..1239: mol_type = other DNA
atggcagatcaagctagtcaagctaatggaaaccaggacgtcattgaaggcgagctgatcgtttcagtggaaccgaagaacggtaaacctgatgtgagcattcaaagtgcacaatccgtaacagggcaggaagacgtccttaaatcgaaaggctttacgatcgttgataccttgcatgtagaggatagcagcgtcaagccactcgtctcgaagaatttcaataagaaagtggtggagaagatgggactggtgtatcttgttcaatactctccggaccagtttaaaagttccaacattgcgaagaaagaactcagaaaagaattgatggatctgggctttaaagtccgctatataagcgaaaattacaagatgatggcgatcgaaggtacagccactcttcaggcagtacaccctaaccaaaactggcattataatatgattaaagctccggaagcgtgggctattacgtctggatcctctagcgttaaagtagcagtcctggatacagggatcgaccataatcacccatccttggccaacttcgtgaatactaatcttggccggtcgtttgttggaggaaacaccatggatgttcaaggtcatggcacacatgttgctggcacgattgcatcttatgggagtgtaagcggagtgatgcagagtgcgacactgatcccggtcaaagtgctcgataattctggcagcgggtccctttacggtattacgcaaggcatattgtatgccgccgacatcgatgcggacgtcattaacatgtctctgggtggaggaggctataatcagagcatggatgaggctgttcaaacagcagttgctcagggaaccattgtagtagcagcgactggcaatgatggtgcatcgtcgatcagttatcctgctgcctacagcagcgtcattgcggtgggatctgtgacgtccaatcgtacacgatcctcgttttctaactatggatctgggcttgaagttatggcaccgggcagcaacatctacagtacgtatcctaattccagatatacatctttgagtggtacaagcatggctactccgcacgttgcgggcgtagctgggctcattcgcgcagccaacccagacatatctgtcgcgcttgcccgtcagattctgcgggataccgcgcaagaagcaggatcgttcacacagtacggctatggaatcgtcgatgctcatgccgccgttgttgctgcatccggtggtagcggcggc

SEQ ID NO: 104 - protein, 413 aa, synthetic construct
  REGION 1..413: note = Variant of serine peptidase from Bacillus sinesaloumensis
MADQASQANGNQDVIEGELIVSVEPKNGKPDVSIQSAQSVTGQEDVLKSKGFTIVDTLHVEDSSVKPLVSKNFNKKVVEKMGLVYLVQYSPDQFKSSNIAKKELRKELMDLGFKVRYISENYKMMAIEGTATLQAVHPNQNWHYNMIKAPEAWAITSGSSSVKVAVLDTGIDHNHPSLANFVNTNLGRSFVGGNTMDVQGHGTHVAGTIASYGSVSGVMQSATLIPVKVLDNSGSGSLYGITQGILYAADIDADVINMSLGGGGYNQSMDEAVQTAVAQGTIVVAATGNDGASSISYPAAYSSVIAVGSVTSNRTRSSFSNYGSGLEVMAPGSNIYSTYPNSRYTSLSGTSMATPHVAGVAGLIRAANPDISVALARQILRDTAQEAGSFTQYGYGIVDAHAAVVAASGGSGG

SEQ ID NO: 105 - DNA, 1239 bp, synthetic construct
  misc_feature 1..1239: note = Variant of serine peptidase from Bacillus sinesaloumensis
  source 1..1239: mol_type = other DNA
atggcagatcaagctagtcaagctaatggaaaccaggacgtcattgaaggcgagctgatcgtttcagtggaaccgaagaacggtaaacctgatgtgagcattcaaagtgcacaatccgtaacagggcaggaagacgtccttaaatcgaaaggctttacgatcgttgataccttgcatgtagaggatagcagcgtcaagccactcgtctcgaagaatttcaataagaaagtggtggagaagatgggactggtgtatcttgttcaatactctccggaccagtttaaaagttccaacattgcgaagaaagaactcagaaaagaattgatggatctgggctttaaagtccgctatataagcgaaaattacaagatgatggcgatcgaaggtacagccactcttcaggcagtacaccctaaccaaaactggcattataatatgattaaagctccggaagcgtgggctattacgtctggatcctctagcgttaaagtagcagtcctggatacagggatcgaccataatcacccatccttggccaacttcgtgaatactaatcttggccggtcgtttgttggaggaaacaccatggatgttcaaggtcatggcacacatgttgctggcacgattgcatcttatgggagtgtaagcggagtgatgcagagtgcgacactgatcccggtcaaagtgctcgataattctggcagcgggtccctttacggtattacgcaaggcatattgtatgccgccgacatcgatgcggacgtcattaacatgtctctgggtggaggaggctataatcagagcatggatgaggctgttcaaacagcagttgctcagggaaccattgtagtagcagcgactggcaatgatggtgcatcgtcgatcagttatcctgctgcctacagcagcgtcattgcggtgggatctgtgacgtccaatcgtacacgatcctcgttttctaactatggatctgggcttgaagttatggcaccgggcagcaacatctacagtacgtatcctaattccagatatacatctttgagtggtacaagcatggctactccgcacgttgcgggcgtagctgggctcattcgcgcagccaacccagacatatctgtcgcgacggcccgtcagattctgcgggataccgcgcaagaagcaggatcgttcacacagtacggctatggaatcgtcgatgctcatgccgccgttgttgctgcatccggtggtagcggcggc

SEQ ID NO: 106 - protein, 413 aa, synthetic construct
  REGION 1..413: note = Variant of serine peptidase from Bacillus sinesaloumensis
MADQASQANGNQDVIEGELIVSVEPKNGKPDVSIQSAQSVTGQEDVLKSKGFTIVDTLHVEDSSVKPLVSKNFNKKVVEKMGLVYLVQYSPDQFKSSNIAKKELRKELMDLGFKVRYISENYKMMAIEGTATLQAVHPNQNWHYNMIKAPEAWAITSGSSSVKVAVLDTGIDHNHPSLANFVNTNLGRSFVGGNTMDVQGHGTHVAGTIASYGSVSGVMQSATLIPVKVLDNSGSGSLYGITQGILYAADIDADVINMSLGGGGYNQSMDEAVQTAVAQGTIVVAATGNDGASSISYPAAYSSVIAVGSVTSNRTRSSFSNYGSGLEVMAPGSNIYSTYPNSRYTSLSGTSMATPHVAGVAGLIRAANPDISVATARQILRDTAQEAGSFTQYGYGIVDAHAAVVAASGGSGG

SEQ ID NO: 107 - DNA, 1239 bp, synthetic construct
  misc_feature 1..1239: note = Variant of serine peptidase from Bacillus sinesaloumensis
  source 1..1239: mol_type = other DNA
atggcagatcaagctagtcaagctaatggaaaccaggacgtcattgaaggcgagctgatcgtttcagtggaaccgaagaacggtaaacctgatgtgagcattcaaagtgcacaatccgtaacagggcaggaagacgtccttaaatcgaaaggctttacgatcgttgataccttgcatgtagaggatagcagcgtcaagccactcgtctcgaagaatttcaataagaaagtggtggagaagatgggactggtgtatcttgttcaatactctccggaccagtttaaaagttccaacattgcgaagaaagaactcagaaaagaattgatggatctgggctttaaagtccgctatataagcgaaaattacaagatgatggcgatcgaattgacagccactcttcaggcagtacaccctaaccaaaactggcattataatatgattaaagctccggaagcgtgggctattacgtctggatcctctagcgttaaagtagcagtcctggatacagggatcgaccataatcacccatccttggccaacttcgtgaatactaatcttggccggtcgtttgttggaggaaacaccatggatgttcaaggtcatggcacacatgttgctggcacgattgcatcttatgggagtgtaagcggagtgatgcagagtgcgacactgatcccggtcaaagtgctcgataattctggcagcgggtccctttacggtattacgcaaggcatattgtatgccgccgacatcgatgcggacgtcattaacatgtctctgggtggaggaggctataatcagagcatggatgaggctgttcaaacagcagttgctcagggaaccattgtagtagcagcgactggcaatgatggtgcatcgtcgatcagttatcctgctgcctacagcagcgtcattgcggtgggatctgtgacgtccaatcgtacacgatcctcgttttctaactatggatctgggcttgaagttatggcaccgggcagcaacatctacagtacgtatcctaattccagatatacatctttgagtggtacaagcatggctactccgcacgttgcgggcgtagctgggctcattcgcgcagccaacccagacatatctgtcgcgcaagcccgtcagattctgcgggataccgcgcaagaagcaggatcgttcacacagtacggctatggaatcgtcgatgctcatgccgccgttgttgctgcatccggtggtagcggcggc

SEQ ID NO: 108 - protein, 413 aa, synthetic construct
  REGION 1..413: note = Variant of serine peptidase from Bacillus sinesaloumensis
MADQASQANGNQDVIEGELIVSVEPKNGKPDVSIQSAQSVTGQEDVLKSKGFTIVDTLHVEDSSVKPLVSKNFNKKVVEKMGLVYLVQYSPDQFKSSNIAKKELRKELMDLGFKVRYISENYKMMAIELTATLQAVHPNQNWHYNMIKAPEAWAITSGSSSVKVAVLDTGIDHNHPSLANFVNTNLGRSFVGGNTMDVQGHGTHVAGTIASYGSVSGVMQSATLIPVKVLDNSGSGSLYGITQGILYAADIDADVINMSLGGGGYNQSMDEAVQTAVAQGTIVVAATGNDGASSISYPAAYSSVIAVGSVTSNRTRSSFSNYGSGLEVMAPGSNIYSTYPNSRYTSLSGTSMATPHVAGVAGLIRAANPDISVAQARQILRDTAQEAGSFTQYGYGIVDAHAAVVAASGGSGG

SEQ ID NO: 109 - DNA, 1239 bp, synthetic construct
  misc_feature 1..1239: note = Variant of serine peptidase from Bacillus sinesaloumensis
  source 1..1239: mol_type = other DNA
atggcagatcaagctagtcaagctaatggaaaccaggacgtcattgaaggcgagctgatcgtttcagtggaaccgaagaacggtaaacctgatgtgagcattcaaagtgcacaatccgtaacagggcaggaagacgtccttaaatcgaaaggctttacgatcgttgataccttgcatgtagaggatagcagcgtcaagccactcgtctcgaagaatttcaataagaaagtggtggagaagatgggactggtgtatcttgttcaatactctccggaccagtttaaaagttccaacattgcgaagaaagaactcagaaaagaattgatggatctgggctttaaagtccgctatataagcgaaaattacaagatgatggcgatcgaaggtacagccccgcttcaggcagtacaccctaaccaaaactggcattataatatgattaaagctccggaagcgtgggctattacgtctggatcctctagcgttaaagtagcagtcctggatacagggatcgaccataatcacccatccttggccaacttcgtgaatactaatcttggccggtcgtttgttggaggaaacaccatggatgttcaaggtcatggcacacatgttgctggcacgattgcatcttatgggagtgtaagcggagtgatgcagagtgcgacactgatcccggtcaaagtgctcgataattctggcagcgggtccctttacggtattacgcaaggcatattgtatgccgccgacatcgatgcggacgtcattaacatgtctctgggtggaggaggctataatcagagcatggatgaggctgttcaaacagcagttgctcagggaaccattgtagtagcagcgactggcaatgatggtgcatcgtcgatcagttatcctgctgcctacagcagcgtcattgcggtgggatctgtgacgtccaatcgtacacgatcctcgttttctaactatggatctgggcttgaagttatggcaccgggcagcaacatctacagtacgtatcctaattccagatatacatctttgagtggtacaagcatggctactccgcacgttgcgggcgtagctgggctcattcgcgcagccaacccagacatatctgtcgcgcaagcccgtcagattctgcgggataccgcgcaagaagcaggatcgttcacacagtacggctatggaatcgtcgatgctcatgccgccgttgttgctgcatccggtggtagcggcggc

SEQ ID NO: 110 - protein, 413 aa, synthetic construct
  REGION 1..413: note = Variant of serine peptidase from Bacillus sinesaloumensis
MADQASQANGNQDVIEGELIVSVEPKNGKPDVSIQSAQSVTGQEDVLKSKGFTIVDTLHVEDSSVKPLVSKNFNKKVVEKMGLVYLVQYSPDQFKSSNIAKKELRKELMDLGFKVRYISENYKMMAIEGTAPLQAVHPNQNWHYNMIKAPEAWAITSGSSSVKVAVLDTGIDHNHPSLANFVNTNLGRSFVGGNTMDVQGHGTHVAGTIASYGSVSGVMQSATLIPVKVLDNSGSGSLYGITQGILYAADIDADVINMSLGGGGYNQSMDEAVQTAVAQGTIVVAATGNDGASSISYPAAYSSVIAVGSVTSNRTRSSFSNYGSGLEVMAPGSNIYSTYPNSRYTSLSGTSMATPHVAGVAGLIRAANPDISVAQARQILRDTAQEAGSFTQYGYGIVDAHAAVVAASGGSGG

SEQ ID NO: 111 - DNA, 1239 bp, synthetic construct
  misc_feature 1..1239: note = Variant of serine peptidase from Bacillus sinesaloumensis
  source 1..1239: mol_type = other DNA
atggcagatcaagctagtcaagctaatggaaaccaggacgtcattgaaggcgagctgatcgtttcagtggaaccgaagaacggtaaacctgatgtgagcattcaaagtgcacaatccgtaacagggcaggaagacgtccttaaatcgaaaggctttacgatcgttgataccttgcatgtagaggatagcagcgtcaagccactcgtctcgaagaatttcaataagaaagtggtggagaagatgggactggtgtatcttgttcaatactctccggaccagtttaaaagttccaacattgcgaagaaagaactcagaaaagaattgatggatctgggctttaaagtccgctatataagcgaaaattacaagatgatggcgatcgaaggtacagccactcttcaggcagtacaccctaaccaaaactggcattataatatgattaaagctccggaagcgtgggctattacgtctggatcctctagcgttaaagtagcagtcctggatacagggatcgaccataatcacccatccttggccaacttcgtgaatatgaatcttggccggtcgtttgttggaggaaacaccatggatgttcaaggtcatggcacacatgttgctggcacgattgcatcttatgggagtgtaagcggagtgatgcagagtgcgacactgatcccggtcaaagtgctcgataattctggcagcgggtccctttacggtattacgcaaggcatattgtatgccgccgacatcgatgcggacgtcattaacatgtctctgggtggaggaggctataatcagagcatggatgaggctgttcaaacagcagttgctcagggaaccattgtagtagcagcgactggcaatgatggtgcatcgtcgatcagttatcctgctgcctacagcagcgtcattgcggtgggatctgtgacgtccaatcgtacacgatcctcgttttctaactatggatctgggcttgaagttatggcaccgggcagcaacatctacagtacgtatcctaattccagatatacatctttgagtggtacaagcatggctactccgcacgttgcgggcgtagctgggctcattcgcgcagccaacccagacatatctgtcgcgcaagcccgtcagattctgcgggataccgcgcaagaagcaggatcgttcacacagtacggctatggaatcgtcgatgctcatgccgccgttgttgctgcatccggtggtagcggcggc

SEQ ID NO: 112 - protein, 413 aa, synthetic construct
  REGION 1..413: note = Variant of serine peptidase from Bacillus sinesaloumensis
MADQASQANGNQDVIEGELIVSVEPKNGKPDVSIQSAQSVTGQEDVLKSKGFTIVDTLHVEDSSVKPLVSKNFNKKVVEKMGLVYLVQYSPDQFKSSNIAKKELRKELMDLGFKVRYISENYKMMAIEGTATLQAVHPNQNWHYNMIKAPEAWAITSGSSSVKVAVLDTGIDHNHPSLANFVNMNLGRSFVGGNTMDVQGHGTHVAGTIASYGSVSGVMQSATLIPVKVLDNSGSGSLYGITQGILYAADIDADVINMSLGGGGYNQSMDEAVQTAVAQGTIVVAATGNDGASSISYPAAYSSVIAVGSVTSNRTRSSFSNYGSGLEVMAPGSNIYSTYPNSRYTSLSGTSMATPHVAGVAGLIRAANPDISVAQARQILRDTAQEAGSFTQYGYGIVDAHAAVVAASGGSGG

SEQ ID NO: 113 - DNA, 1239 bp, synthetic construct
  misc_feature 1..1239: note = Variant of serine peptidase from Bacillus sinesaloumensis
  source 1..1239: mol_type = other DNA
atggcagatcaagctagtcaagctaatggaaaccaggacgtcattgaaggcgagctgatcgtttcagtggaaccgaagaacggtaaacctgatgtgagcattcaaagtgcacaatccgtaacagggcaggaagacgtccttaaatcgaaaggctttacgatcgttgataccttgcatgtagaggatagcagcgtcaagccactcgtctcgaagaatttcaataagaaagtggtggagaagatgggactggtgtatcttgttcaatactctccggaccagtttaaaagttccaacattgcgaagaaagaactcagaaaagaattgatggatctgggctttaaagtccgctatataagcgaaaattacaagatgatggcgatcgaaggtacagccactcttcaggcaggtcaccctaaccaaaactggcattataatatgattaaagctccggaagcgtgggctattacgtctggatcctctagcgttaaagtagcagtcctggatacagggatcgaccataatcacccatccttggccaacttcgtgaatactaatcttggccggtcgtttgttggaggaaacaccatggatgttcaaggtcatggcacacatgttgctggcacgattgcatcttatgggagtgtaagcggagtgatgcagagtgcgacactgatcccggtcaaagtgctcgataattctggcagcgggtccctttacggtattacgcaaggcatattgtatgccgccgacatcgatgcggacgtcattaacatgtctctgggtggaggaggctataatcagagcatggatgaggctgttcaaacagcagttgctcagggaaccattgtagtagcagcgactggcaatgatggtgcatcgtcgatcagttatcctgctgcctacagcagcgtcattgcggtgggatctgtgacgtccaatcgtacacgatcctcgttttctaactatggatctgggcttgaagttatggcaccgggcagcaacatctacagtacgtatcctaattccagatatacatctttgagtggtacaagcatggctactccgcacgttgcgggcgtagctgggctcattcgcgcagccaacccagacatatctgtcgcgcaagcccgtcagattctgcgggataccgcgcaagaagcaggatcgttcacacagtacggctatggaatcgtcgatgctcatgccgccgttgttgctgcatccggtggtagcggcggc

SEQ ID NO: 114 - protein, 413 aa, synthetic construct
  REGION 1..413: note = Variant of serine peptidase from Bacillus sinesaloumensis
MADQASQANGNQDVIEGELIVSVEPKNGKPDVSIQSAQSVTGQEDVLKSKGFTIVDTLHVEDSSVKPLVSKNFNKKVVEKMGLVYLVQYSPDQFKSSNIAKKELRKELMDLGFKVRYISENYKMMAIEGTATLQAGHPNQNWHYNMIKAPEAWAITSGSSSVKVAVLDTGIDHNHPSLANFVNTNLGRSFVGGNTMDVQGHGTHVAGTIASYGSVSGVMQSATLIPVKVLDNSGSGSLYGITQGILYAADIDADVINMSLGGGGYNQSMDEAVQTAVAQGTIVVAATGNDGASSISYPAAYSSVIAVGSVTSNRTRSSFSNYGSGLEVMAPGSNIYSTYPNSRYTSLSGTSMATPHVAGVAGLIRAANPDISVAQARQILRDTAQEAGSFTQYGYGIVDAHAAVVAASGGSGG

SEQ ID NO: 115 - DNA, 1239 bp, synthetic construct
  misc_feature 1..1239: note = Variant of serine peptidase from Bacillus sinesaloumensis
  source 1..1239: mol_type = other DNA
atggcagatcaagctagtcaagctaatggaaaccaggacgtcattgaaggcgagctgatcgtttcagtggaaccgaagaacggtaaacctgatgtgagcattcaaagtgcacaatccgtaacagggcaggaagacgtccttaaatcgaaaggctttacgatcgttgataccttgcatgtagaggatagcagcgtcaagccactcgtctcgaagaatttcaataagaaagtggtggagaagatgggactggtgtatcttgttcaatactctccggaccagtttaaaagttccaacattgcgaagaaagaactcagaaaagaattgatggatctgggctttaaagtccgctatataagcgaaaattacaagatgatggcgatcgaaggtacagccactcttcaggcagtacaccctaaccaaaactggcattataatatgattaaagctccggaagcgtgggctattacgtctggatcctctagcgttaaagtagcagtcctggatacagggatcgaccataatcacccatccttggccaacttcgtgaatactaatgctggccggtcgtttgttggaggaaacaccatggatgttcaaggtcatggcacacatgttgctggcacgattgcatcttatgggagtgtaagcggagtgatgcagagtgcgacactgatcccggtcaaagtgctcgataattctggcagcgggtccctttacggtattacgcaaggcatattgtatgccgccgacatcgatgcggacgtcattaacatgtctctgggtggaggaggctataatcagagcatggatgaggctgttcaaacagcagttgctcagggaaccattgtagtagcagcgactggcaatgatggtgcatcgtcgatcagttatcctgctgcctacagcagcgtcattgcggtgggatctgtgacgtccaatcgtacacgatcctcgttttctaactatggatctgggcttgaagttatggcaccgggcagcaacatctacagtacgtatcctaattccagatatacatctttgagtggtacaagcatggctactccgcacgttgcgggcgtagctgggctcattcgcgcagccaacccagacatatctgtcgcgcaagcccgtcagattctgcgggataccgcgcaagaagcaggatcgttcacacagtacggctatggaatcgtcgatgctcatgccgccgttgttgctgcatccggtggtagcggcggc

SEQ ID NO: 116 - protein, 413 aa, synthetic construct
  REGION 1..413: note = Variant of serine peptidase from Bacillus sinesaloumensis
MADQASQANGNQDVIEGELIVSVEPKNGKPDVSIQSAQSVTGQEDVLKSKGFTIVDTLHVEDSSVKPLVSKNFNKKVVEKMGLVYLVQYSPDQFKSSNIAKKELRKELMDLGFKVRYISENYKMMAIEGTATLQAVHPNQNWHYNMIKAPEAWAITSGSSSVKVAVLDTGIDHNHPSLANFVNTNAGRSFVGGNTMDVQGHGTHVAGTIASYGSVSGVMQSATLIPVKVLDNSGSGSLYGITQGILYAADIDADVINMSLGGGGYNQSMDEAVQTAVAQGTIVVAATGNDGASSISYPAAYSSVIAVGSVTSNRTRSSFSNYGSGLEVMAPGSNIYSTYPNSRYTSLSGTSMATPHVAGVAGLIRAANPDISVAQARQILRDTAQEAGSFTQYGYGIVDAHAAVVAASGGSGG

SEQ ID NO: 117 - DNA, 1239 bp, synthetic construct
  misc_feature 1..1239: note = Variant of serine peptidase from Bacillus sinesaloumensis
  source 1..1239: mol_type = other DNA
atggcagatcaagctagtcaagctaatggaaaccaggacgtcattgaaggcgagctgatcgtttcagtggaaccgaagaacggtaaacctgatgtgagcattcaaagtgcacaatccgtaacagggcaggaagacgtccttaaatcgaaaggctttacgatcgttgataccttgcatgtagaggatagcagcgtcaagccactcgtctcgaagaatttcaataagaaagtggtggagaagatgggactggtgtatcttgttcaatactctccggaccagtttaaaagttccaacattgcgaagaaagaactcagaaaagaattgatggatctgggctttaaagtccgctatataagcgaaaattacaagatgatggcgatcgaaggtacagccactcttcagagtgtacaccctaaccaaaactggcattataatatgattaaagctccggaagcgtgggctattacgtctggatcctctagcgttaaagtagcagtcctggatacagggatcgaccataatcacccatccttggccaacttcgtgaatactaatcttggccggtcgtttgttggaggaaacaccatggatgttcaaggtcatggcacacatgttgctggcacgattgcatcttatgggagtgtaagcggagtgatgcagagtgcgacactgatcccggtcaaagtgctcgataattctggcagcgggtccctttacggtattacgcaaggcatattgtatgccgccgacatcgatgcggacgtcattaacatgtctctgggtggaggaggctataatcagagcatggatgaggctgttcaaacagcagttgctcagggaaccattgtagtagcagcgactggcaatgatggtgcatcgtcgatcagttatcctgctgcctacagcagcgtcattgcggtgggatctgtgacgtccaatcgtacacgatcctcgttttctaactatggatctgggcttgaagttatggcaccgggcagcaacatctacagtacgtatcctaattccagatatacatctttgagtggtacaagcatggctactccgcacgttgcgggcgtagctgggctcattcgcgcagccaacccagacatatctgtcgcgcaagcccgtcagattctgcgggataccgcgcaagaagcaggatcgttcacacagtacggctatggaatcgtcgatgctcatgccgccgttgttgctgcatccggtggtagcggcggc

SEQ ID NO: 118 - protein, 413 aa, synthetic construct
  REGION 1..413: note = Variant of serine peptidase from Bacillus sinesaloumensis
MADQASQANGNQDVIEGELIVSVEPKNGKPDVSIQSAQSVTGQEDVLKSKGFTIVDTLHVEDSSVKPLVSKNFNKKVVEKMGLVYLVQYSPDQFKSSNIAKKELRKELMDLGFKVRYISENYKMMAIEGTATLQSVHPNQNWHYNMIKAPEAWAITSGSSSVKVAVLDTGIDHNHPSLANFVNTNLGRSFVGGNTMDVQGHGTHVAGTIASYGSVSGVMQSATLIPVKVLDNSGSGSLYGITQGILYAADIDADVINMSLGGGGYNQSMDEAVQTAVAQGTIVVAATGNDGASSISYPAAYSSVIAVGSVTSNRTRSSFSNYGSGLEVMAPGSNIYSTYPNSRYTSLSGTSMATPHVAGVAGLIRAANPDISVAQARQILRDTAQEAGSFTQYGYGIVDAHAAVVAASGGSGG

SEQ ID NO: 119 - DNA, 1239 bp, synthetic construct
  misc_feature 1..1239: note = Variant of serine peptidase from Bacillus sinesaloumensis
  source 1..1239: mol_type = other DNA
atggcagatcaagctagtcaagctaatggaaaccaggacgtcattgaaggcgagctgatcgtttcagtggaaccgaagaacggtaaacctgatgtgagcattcaaagtgcacaatccgtaacagggcaggaagacgtccttaaatcgaaaggctttacgatcgttgataccttgcatgtagaggatagcagcgtcaagccactcgtctcgaagaatttcaataagaaagtggtggagaagatgggactggtgtatcttgttcaatactctccggaccagtttaaaagttccaacattgcgaagaaagaactcagaaaagaattgatggatctgggctttaaagtccgctatataagcgaaaattacaagatgatggcgatcgaaggtacagccactcttcaggcagtacaccctaaccaaaactggcattataatatgattaaagctccggaagcgtgggctattacgtctggatcctctagcgttaaagtagcagtcctggatacagggatcgaccataatcacccatccttggccaacttcgtgaatactaatcttggccggtcgtttgttggaggaaacaccatggatgttcaaggtcatggcacacatgttgctggcacgattgcatcttatgggagtgtaagcggagtgatgctgagtgcgacactgatcccggtcaaagtgctcgataattctggcagcgggtccctttacggtattacgcaaggcatattgtatgccgccgacatcgatgcggacgtcattaacatgtctctgggtggaggaggctataatcagagcatggatgaggctgttcaaacagcagttgctcagggaaccattgtagtagcagcgactggcaatgatggtgcatcgtcgatcagttatcctgctgcctacagcagcgtcattgcggtgggatctgtgacgtccaatcgtacacgatcctcgttttctaactatggatctgggcttgaagttatggcaccgggcagcaacatctacagtacgtatcctaattccagatatacatctttgagtggtacaagcatggctactccgcacgttgcgggcgtagctgggctcattcgcgcagccaacccagacatatctgtcgcgcaagcccgtcagattctgcgggataccgcgcaagaagcaggatcgttcacacagtacggctatggaatcgtcgatgctcatgccgccgttgttgctgcatccggtggtagcggcggc

SEQ ID NO: 120 - protein, 413 aa, synthetic construct
  REGION 1..413: note = Variant of serine peptidase from Bacillus sinesaloumensis
MADQASQANGNQDVIEGELIVSVEPKNGKPDVSIQSAQSVTGQEDVLKSKGFTIVDTLHVEDSSVKPLVSKNFNKKVVEKMGLVYLVQYSPDQFKSSNIAKKELRKELMDLGFKVRYISENYKMMAIEGTATLQAVHPNQNWHYNMIKAPEAWAITSGSSSVKVAVLDTGIDHNHPSLANFVNTNLGRSFVGGNTMDVQGHGTHVAGTIASYGSVSGVMLSATLIPVKVLDNSGSGSLYGITQGILYAADIDADVINMSLGGGGYNQSMDEAVQTAVAQGTIVVAATGNDGASSISYPAAYSSVIAVGSVTSNRTRSSFSNYGSGLEVMAPGSNIYSTYPNSRYTSLSGTSMATPHVAGVAGLIRAANPDISVAQARQILRDTAQEAGSFTQYGYGIVDAHAAVVAASGGSGG

SEQ ID NO: 121 - DNA, 1239 bp, synthetic construct
  misc_feature 1..1239: note = Variant of serine peptidase from Bacillus sinesaloumensis
  source 1..1239: mol_type = other DNA
atggcagatcaagctagtcaagctaatggaaaccaggacgtcattgaaggcgagctgatcgtttcagtggaaccgaagaacggtaaacctgatgtgagcattcaaagtgcacaatccgtaacagggcaggaagacgtccttaaatcgaaaggctttacgatcgttgataccttgcatgtagaggatagcagcgtcaagccactcgtctcgaagaatttcaataagaaagtggtggagaagatgggactggtgtatcttgttcaatactctccggaccagtttaaaagttccaacattgcgaagaaagaactcagaaaagaattgatggatctgggctttaaagtccgctatataagcgaaaattacaagatgatggcgatcgaaggtacagccactcttccggcagtacaccctaaccaaaactggcattataatatgattaaagctccggaagcgtgggctattacgtctggatcctctagcgttaaagtagcagtcctggatacagggatcgaccataatcacccatccttggccaacttcgtgaatactaatcttggccggtcgtttgttggaggaaacaccatggatgttcaaggtcatggcacacatgttgctggcacgattgcatcttatgggagtgtaagcggagtgatgcagagtgcgacactgatcccggtcaaagtgctcgataattctggcagcgggtccctttacggtattacgcaaggcatattgtatgccgccgacatcgatgcggacgtcattaacatgtctctgggtggaggaggctataatcagagcatggatgaggctgttcaaacagcagttgctcagggaaccattgtagtagcagcgactggcaatgatggtgcatcgtcgatcagttatcctgctgcctacagcagcgtcattgcggtgggatctgtgacgtccaatcgtacacgatcctcgttttctaactatggatctgggcttgaagttatggcaccgggcagcaacatctacagtacgtatcctaattccagatatacatctttgagtggtacaagcatggctactccgcacgttgcgggcgtagctgggctcattcgcgcagccaacccagacatatctgtcgcgcaagcccgtcagattctgcgggataccgcgcaagaagcaggatcgttcacacagtacggctatggaatcgtcgatgctcatgccgccgttgttgctgcatccggtggtagcggcggc

SEQ ID NO: 122 - protein, 413 aa, synthetic construct
  REGION 1..413: note = Variant of serine peptidase from Bacillus sinesaloumensis
MADQASQANGNQDVIEGELIVSVEPKNGKPDVSIQSAQSVTGQEDVLKSKGFTIVDTLHVEDSSVKPLVSKNFNKKVVEKMGLVYLVQYSPDQFKSSNIAKKELRKELMDLGFKVRYISENYKMMAIEGTATLPAVHPNQNWHYNMIKAPEAWAITSGSSSVKVAVLDTGIDHNHPSLANFVNTNLGRSFVGGNTMDVQGHGTHVAGTIASYGSVSGVMQSATLIPVKVLDNSGSGSLYGITQGILYAADIDADVINMSLGGGGYNQSMDEAVQTAVAQGTIVVAATGNDGASSISYPAAYSSVIAVGSVTSNRTRSSFSNYGSGLEVMAPGSNIYSTYPNSRYTSLSGTSMATPHVAGVAGLIRAANPDISVAQARQILRDTAQEAGSFTQYGYGIVDAHAAVVAASGGSGG

SEQ ID NO: 123 - DNA, 1239 bp, synthetic construct
  misc_feature 1..1239: note = Variant of serine peptidase from Bacillus sinesaloumensis
  source 1..1239: mol_type = other DNA
atggcagatcaagctagtcaagctaatggaaaccaggacgtcattgaaggcgagctgatcgtttcagtggaaccgaagaacggtaaacctgatgtgagcattcaaagtgcacaatccgtaacagggcaggaagacgtccttaaatcgaaaggctttacgatcgttgataccttgcatgtagaggatagcagcgtcaagccactcgtctcgaagaatttcaataagaaagtggtggagaagatgggactggtgtatcttgttcaatactctccggaccagtttaaaagttccaacattgcgaagaaagaactcagaaaagaattgatggatctgggctttaaagtccgctatataagcgaaaattacaagatgatggcgatcgaaggtacagccgcgcttcaggcagtacaccctaaccaaaactggcattataatatgattaaagctccggaagcgtgggctattacgtctggatcctctagcgttaaagtagcagtcctggatacagggatcgaccataatcacccatccttggccaacttcgtgaatactaatcttggccggtcgtttgttggaggaaacaccatggatgttcaaggtcatggcacacatgttgctggcacgattgcatcttatgggagtgtaagcggagtgatgcagagtgcgacactgatcccggtcaaagtgctcgataattctggcagcgggtccctttacggtattacgcaaggcatattgtatgccgccgacatcgatgcggacgtcattaacatgtctctgggtggaggaggctataatcagagcatggatgaggctgttcaaacagcagttgctcagggaaccattgtagtagcagcgactggcaatgatggtgcatcgtcgatcagttatcctgctgcctacagcagcgtcattgcggtgggatctgtgacgtccaatcgtacacgatcctcgttttctaactatggatctgggcttgaagttatggcaccgggcagcaacatctacagtacgtatcctaattccagatatacatctttgagtggtacaagcatggctactccgcacgttgcgggcgtagctgggctcattcgcgcagccaacccagacatatctgtcgcgcaagcccgtcagattctgcgggataccgcgcaagaagcaggatcgttcacacagtacggctatggaatcgtcgatgctcatgccgccgttgttgctgcatccggtggtagcggcggc

SEQ ID NO: 124 - protein, 413 aa, synthetic construct
  REGION 1..413: note = Variant of serine peptidase from Bacillus sinesaloumensis
MADQASQANGNQDVIEGELIVSVEPKNGKPDVSIQSAQSVTGQEDVLKSKGFTIVDTLHVEDSSVKPLVSKNFNKKVVEKMGLVYLVQYSPDQFKSSNIAKKELRKELMDLGFKVRYISENYKMMAIEGTAALQAVHPNQNWHYNMIKAPEAWAITSGSSSVKVAVLDTGIDHNHPSLANFVNTNLGRSFVGGNTMDVQGHGTHVAGTIASYGSVSGVMQSATLIPVKVLDNSGSGSLYGITQGILYAADIDADVINMSLGGGGYNQSMDEAVQTAVAQGTIVVAATGNDGASSISYPAAYSSVIAVGSVTSNRTRSSFSNYGSGLEVMAPGSNIYSTYPNSRYTSLSGTSMATPHVAGVAGLIRAANPDISVAQARQILRDTAQEAGSFTQYGYGIVDAHAAVVAASGGSGG

SEQ ID NO: 125 - DNA, 1239 bp, synthetic construct
  misc_feature 1..1239: note = Variant of serine peptidase from Bacillus sinesaloumensis
  source 1..1239: mol_type = other DNA
atggcagatcaagctagtcaagctaatggaaaccaggacgtcattgaaggcgagctgatcgtttcagtggaaccgaagaacggtaaacctgatgtgagcattcaaagtgcacaatccgtaacagggcaggaagacgtccttaaatcgaaaggctttacgatcgttgataccttgcatgtagaggatagcagcgtcaagccactcgtctcgaagaatttcaataagaaagtggtggagaagatgggactggtgtatcttgttcaatactctccggaccagtttaaaagttccaacattgcgaagaaagaactcagaaaagaattgatggatctgggctttaaagtccgctatataagcgaaaattacaagatgatggcgatcgaaggtacagccactcttcaggcagtacaccctaaccaaatgtggcattataatatgattaaagctccggaagcgtgggctattacgtctggatcctctagcgttaaagtagcagtcctggatacagggatcgaccataatcacccatccttggccaacttcgtgaatactaatcttggccggtcgtttgttggaggaaacaccatggatgttcaaggtcatggcacacatgttgctggcacgattgcatcttatgggagtgtaagcggagtgatgcagagtgcgacactgatcccggtcaaagtgctcgataattctggcagcgggtccctttacggtattacgcaaggcatattgtatgccgccgacatcgatgcggacgtcattaacatgtctctgggtggaggaggctataatcagagcatggatgaggctgttcaaacagcagttgctcagggaaccattgtagtagcagcgactggcaatgatggtgcatcgtcgatcagttatcctgctgcctacagcagcgtcattgcggtgggatctgtgacgtccaatcgtacacgatcctcgttttctaactatggatctgggcttgaagttatggcaccgggcagcaacatctacagtacgtatcctaattccagatatacatctttgagtggtacaagcatggctactccgcacgttgcgggcgtagctgggctcattcgcgcagccaacccagacatatctgtcgcgcaagcccgtcagattctgcgggataccgcgcaagaagcaggatcgttcacacagtacggctatggaatcgtcgatgctcatgccgccgttgttgctgcatccggtggtagcggcggc

SEQ ID NO: 126 - protein, 413 aa, synthetic construct
  REGION 1..413: note = Variant of serine peptidase from Bacillus sinesaloumensis
MADQASQANGNQDVIEGELIVSVEPKNGKPDVSIQSAQSVTGQEDVLKSKGFTIVDTLHVEDSSVKPLVSKNFNKKVVEKMGLVYLVQYSPDQFKSSNIAKKELRKELMDLGFKVRYISENYKMMAIEGTATLQAVHPNQMWHYNMIKAPEAWAITSGSSSVKVAVLDTGIDHNHPSLANFVNTNLGRSFVGGNTMDVQGHGTHVAGTIASYGSVSGVMQSATLIPVKVLDNSGSGSLYGITQGILYAADIDADVINMSLGGGGYNQSMDEAVQTAVAQGTIVVAATGNDGASSISYPAAYSSVIAVGSVTSNRTRSSFSNYGSGLEVMAPGSNIYSTYPNSRYTSLSGTSMATPHVAGVAGLIRAANPDISVAQARQILRDTAQEAGSFTQYGYGIVDAHAAVVAASGGSGG

SEQ ID NO: 127 - DNA, 1239 bp, synthetic construct
  misc_feature 1..1239: note = Variant of serine peptidase from Bacillus sinesaloumensis
  source 1..1239: mol_type = other DNA
atggcagatcaagctagtcaagctaatggaaaccaggacgtcattgaaggcgagctgatcgtttcagtggaaccgaagaacggtaaacctgatgtgagcattcaaagtgcacaatccgtaacagggcaggaagacgtccttaaatcgaaaggctttacgatcgttgataccttgcatgtagaggatagcagcgtcaagccactcgtctcgaagaatttcaataagaaagtggtggagaagatgggactggtgtatcttgttcaatactctccggaccagtttaaaagttccaacattgcgaagaaagaactcagaaaagaattgatggatctgggctttaaagtccgctatataagcgaaaattacaagatgatggcgatcgaaggtacagccactcttcagattgtacaccctaaccaaaactggcattataatatgattaaagctccggaagcgtgggctattacgtctggatcctctagcgttaaagtagcagtcctggatacagggatcgaccataatcacccatccttggccaacttcgtgaatactaatcttggccggtcgtttgttggaggaaacaccatggatgttcaaggtcatggcacacatgttgctggcacgattgcatcttatgggagtgtaagcggagtgatgcagagtgcgacactgatcccggtcaaagtgctcgataattctggcagcgggtccctttacggtattacgcaaggcatattgtatgccgccgacatcgatgcggacgtcattaacatgtctctgggtggaggaggctataatcagagcatggatgaggctgttcaaacagcagttgctcagggaaccattgtagtagcagcgactggcaatgatggtgcatcgtcgatcagttatcctgctgcctacagcagcgtcattgcggtgggatctgtgacgtccaatcgtacacgatcctcgttttctaactatggatctgggcttgaagttatggcaccgggcagcaacatctacagtacgtatcctaattccagatatacatctttgagtggtacaagcatggctactccgcacgttgcgggcgtagctgggctcattcgcgcagccaacccagacatatctgtcgcgcaagcccgtcagattctgcgggataccgcgcaagaagcaggatcgttcacacagtacggctatggaatcgtcgatgctcatgccgccgttgttgctgcatccggtggtagcggcggc

SEQ ID NO: 128 - protein, 413 aa, synthetic construct
  REGION 1..413: note = Variant of serine peptidase from Bacillus sinesaloumensis
MADQASQANGNQDVIEGELIVSVEPKNGKPDVSIQSAQSVTGQEDVLKSKGFTIVDTLHVEDSSVKPLVSKNFNKKVVEKMGLVYLVQYSPDQFKSSNIAKKELRKELMDLGFKVRYISENYKMMAIEGTATLQIVHPNQNWHYNMIKAPEAWAITSGSSSVKVAVLDTGIDHNHPSLANFVNTNLGRSFVGGNTMDVQGHGTHVAGTIASYGSVSGVMQSATLIPVKVLDNSGSGSLYGITQGILYAADIDADVINMSLGGGGYNQSMDEAVQTAVAQGTIVVAATGNDGASSISYPAAYSSVIAVGSVTSNRTRSSFSNYGSGLEVMAPGSNIYSTYPNSRYTSLSGTSMATPHVAGVAGLIRAANPDISVAQARQILRDTAQEAGSFTQYGYGIVDAHAAVVAASGGSGG

SEQ ID NO: 129 - DNA, 1239 bp, synthetic construct
  misc_feature 1..1239: note = Variant of serine peptidase from Bacillus sinesaloumensis
  source 1..1239: mol_type = other DNA
atggcagatcaagctagtcaagctaatggaaaccaggacgtcattgaaggcgagctgatcgtttcagtggaaccgaagaacggtaaacctgatgtgagcattcaaagtgcacaatccgtaacagggcaggaagacgtccttaaatcgaaaggctttacgatcgttgataccttgcatgtagaggatagcagcgtcaagccactcgtctcgaagaatttcaataagaaagtggtggagaagatgggactggtgtatcttgttcaatactctccggaccagtttaaaagttccaacattgcgaagaaagaactcagaaaagaattgatggatctgggctttaaagtccgctatataagcgaaaattacaagatgatggcgatcgaaggtacagccactcttcaggcagtacaccctaaccaaaactggcattataatatgattaaagctccggaagcgtgggctattacgtctggatcctctagcgttaaagtagcagtcctggatacagggatcgaccataatcacccatccttggccaacttcgtgaatactaatcttggccggtcgtttgttggaggagataccatggatgttcaaggtcatggcacacatgttgctggcacgattgcatcttatgggagtgtaagcggagtgatgcagagtgcgacactgatcccggtcaaagtgctcgataattctggcagcgggtccctttacggtattacgcaaggcatattgtatgccgccgacatcgatgcggacgtcattaacatgtctctgggtggaggaggctataatcagagcatggatgaggctgttcaaacagcagttgctcagggaaccattgtagtagcagcgactggcaatgatggtgcatcgtcgatcagttatcctgctgcctacagcagcgtcattgcggtgggatctgtgacgtccaatcgtacacgatcctcgttttctaactatggatctgggcttgaagttatggcaccgggcagcaacatctacagtacgtatcctaattccagatatacatctttgagtggtacaagcatggctactccgcacgttgcgggcgtagctgggctcattcgcgcagccaacccagacatatctgtcgcgcaagcccgtcagattctgcgggataccgcgcaagaagcaggatcgttcacacagtacggctatggaatcgtcgatgctcatgccgccgttgttgctgcatccggtggtagcggcggc

SEQ ID NO: 130 - protein, 413 aa, synthetic construct
  REGION 1..413: note = Variant of serine peptidase from Bacillus sinesaloumensis
MADQASQANGNQDVIEGELIVSVEPKNGKPDVSIQSAQSVTGQEDVLKSKGFTIVDTLHVEDSSVKPLVSKNFNKKVVEKMGLVYLVQYSPDQFKSSNIAKKELRKELMDLGFKVRYISENYKMMAIEGTATLQAVHPNQNWHYNMIKAPEAWAITSGSSSVKVAVLDTGIDHNHPSLANFVNTNLGRSFVGGDTMDVQGHGTHVAGTIASYGSVSGVMQSATLIPVKVLDNSGSGSLYGITQGILYAADIDADVINMSLGGGGYNQSMDEAVQTAVAQGTIVVAATGNDGASSISYPAAYSSVIAVGSVTSNRTRSSFSNYGSGLEVMAPGSNIYSTYPNSRYTSLSGTSMATPHVAGVAGLIRAANPDISVAQARQILRDTAQEAGSFTQYGYGIVDAHAAVVAASGGSGG

SEQ ID NO: 131 - DNA, 1239 bp, synthetic construct
  misc_feature 1..1239: note = Variant of serine peptidase from Bacillus sinesaloumensis
  source 1..1239: mol_type = other DNA
atggcagatcaagctagtcaagctaatggaaaccaggacgtcattgaaggcgagctgatcgtttcagtggaaccgaagaacggtaaacctgatgtgagcattcaaagtgcacaatccgtaacagggcaggaagacgtccttaaatcgaaaggctttacgatcgttgataccttgcatgtagaggatagcagcgtcaagccactcgtctcgaagaatttcaataagaaagtggtggagaagatgggactggtgtatcttgttcaatactctccggaccagtttaaaagttccaacattgcgaagaaagaactcagaaaagaattgatggatctgggctttaaagtccgctatataagcgaaaattacaagatgatggcgatcgaaggtacagccactcttcaggcagtacaccctaaccaaaactggcattataatatgattaaagctccggaagcgtgggctattacgtctggatcctctagcgttaaagtagcagtcctggatacagggatcgaccataatcacccatccttggccaacttcgtgaatactcagcttggccggtcgtttgttggaggaaacaccatggatgttcaaggtcatggcacacatgttgctggcacgattgcatcttatgggagtgtaagcggagtgatgcagagtgcgacactgatcccggtcaaagtgctcgataattctggcagcgggtccctttacggtattacgcaaggcatattgtatgccgccgacatcgatgcggacgtcattaacatgtctctgggtggaggaggctataatcagagcatggatgaggctgttcaaacagcagttgctcagggaaccattgtagtagcagcgactggcaatgatggtgcatcgtcgatcagttatcctgctgcctacagcagcgtcattgcggtgggatctgtgacgtccaatcgtacacgatcctcgttttctaactatggatctgggcttgaagttatggcaccgggcagcaacatctacagtacgtatcctaattccagatatacatctttgagtggtacaagcatggctactccgcacgttgcgggcgtagctgggctcattcgcgcagccaacccagacatatctgtcgcgcaagcccgtcagattctgcgggataccgcgcaagaagcaggatcgttcacacagtacggctatggaatcgtcgatgctcatgccgccgttgttgctgcatccggtggtagcggcggc

SEQ ID NO: 132 - protein, 413 aa, synthetic construct
  REGION 1..413: note = Variant of serine peptidase from Bacillus sinesaloumensis
MADQASQANGNQDVIEGELIVSVEPKNGKPDVSIQSAQSVTGQEDVLKSKGFTIVDTLHVEDSSVKPLVSKNFNKKVVEKMGLVYLVQYSPDQFKSSNIAKKELRKELMDLGFKVRYISENYKMMAIEGTATLQAVHPNQNWHYNMIKAPEAWAITSGSSSVKVAVLDTGIDHNHPSLANFVNTQLGRSFVGGNTMDVQGHGTHVAGTIASYGSVSGVMQSATLIPVKVLDNSGSGSLYGITQGILYAADIDADVINMSLGGGGYNQSMDEAVQTAVAQGTIVVAATGNDGASSISYPAAYSSVIAVGSVTSNRTRSSFSNYGSGLEVMAPGSNIYSTYPNSRYTSLSGTSMATPHVAGVAGLIRAANPDISVAQARQILRDTAQEAGSFTQYGYGIVDAHAAVVAASGGSGG

SEQ ID NO: 133 - DNA, 1239 bp, synthetic construct
  misc_feature 1..1239: note = Variant of serine peptidase from Bacillus sinesaloumensis
  source 1..1239: mol_type = other DNA
atggcagatcaagctagtcaagctaatggaaaccaggacgtcattgaaggcgagctgatcgtttcagtggaaccgaagaacggtaaacctgatgtgagcattcaaagtgcacaatccgtaacagggcaggaagacgtccttaaatcgaaaggctttacgatcgttgataccttgcatgtagaggatagcagcgtcaagccactcgtctcgaagaatttcaataagaaagtggtggagaagatgggactggtgtatcttgttcaatactctccggaccagtttaaaagttccaacattgcgaagaaagaactcagaaaagaattgatggatctgggctttaaagtccgctatataagcgaaaattacaagatgatggcgatcgaaggtacagccactcttcaggcagtacaccctaaccaaaactggcattataatatgattaaagctccggaagcgtgggctattacgtctggatcctctagcgttaaagtagcagtcctggatacagggatcgaccataatcacccatccttggccaacttcgtgaatactaatcttggccggtcgtttgttggaggaaacaccatggatgttcaaggtcatggcacacatgttgctggcacgattgcatcttatgggagtgtaagcggagtgatgcagagtgcgacactgatcccggtcaaagtgctcgataattctggcagcgggtccctttacggtattacgcaaggcatattgtatgccgccgacatcgatgcggacgtcattaacatgtctctgggtggacatggctataatcagagcatggatgaggctgttcaaacagcagttgctcagggaaccattgtagtagcagcgactggcaatgatggtgcatcgtcgatcagttatcctgctgcctacagcagcgtcattgcggtgggatctgtgacgtccaatcgtacacgatcctcgttttctaactatggatctgggcttgaagttatggcaccgggcagcaacatctacagtacgtatcctaattccagatatacatctttgagtggtacaagcatggctactccgcacgttgcgggcgtagctgggctcattcgcgcagccaacccagacatatctgtcgcgcaagcccgtcagattctgcgggataccgcgcaagaagcaggatcgttcacacagtacggctatggaatcgtcgatgctcatgccgccgttgttgctgcatccggtggtagcggcggc

SEQ ID NO: 134 - protein, 413 aa, synthetic construct
  REGION 1..413: note = Variant of serine peptidase from Bacillus sinesaloumensis
MADQASQANGNQDVIEGELIVSVEPKNGKPDVSIQSAQSVTGQEDVLKSKGFTIVDTLHVEDSSVKPLVSKNFNKKVVEKMGLVYLVQYSPDQFKSSNIAKKELRKELMDLGFKVRYISENYKMMAIEGTATLQAVHPNQNWHYNMIKAPEAWAITSGSSSVKVAVLDTGIDHNHPSLANFVNTNLGRSFVGGNTMDVQGHGTHVAGTIASYGSVSGVMQSATLIPVKVLDNSGSGSLYGITQGILYAADIDADVINMSLGGHGYNQSMDEAVQTAVAQGTIVVAATGNDGASSISYPAAYSSVIAVGSVTSNRTRSSFSNYGSGLEVMAPGSNIYSTYPNSRYTSLSGTSMATPHVAGVAGLIRAANPDISVAQARQILRDTAQEAGSFTQYGYGIVDAHAAVVAASGGSGG

SEQ ID NO: 135 - DNA, 1239 bp, synthetic construct
  misc_feature 1..1239: note = Variant of serine peptidase from Bacillus sinesaloumensis
  source 1..1239: mol_type = other DNA
atggcagatcaagctagtcaagctaatggaaaccaggacgtcattgaaggcgagctgatcgtttcagtggaaccgaagaacggtaaacctgatgtgagcattcaaagtgcacaatccgtaacagggcaggaagacgtccttaaatcgaaaggctttacgatcgttgataccttgcatgtagaggatagcagcgtcaagccactcgtctcgaagaatttcaataagaaagtggtggagaagatgggactggtgtatcttgttcaatactctccggaccagtttaaaagttccaacattgcgaagaaagaactcagaaaagaattgatggatctgggctttaaagtccgctatataagcgaaaattacaagatgatggcgatcgaaggtacagccactcttcaggcagtacaccctaaccaaaactggcattataatatgattaaagctccggaagcgtgggctattacgtctggatcctctagcgttaaagtagcagtcctggatacagggatcgaccataatcacccatccttggccaacttcgtgaatactaatcttggccggtcgtttgttggaggaaacaccatggatgttcaaggtcatggcacacatgttgctggcacgattgcatcttatgggagtgtaagcggagtgatgcagagtgcgacactgatcccggtcaaagtgctcgataattctggcagcgggtccctttacggtattacgcaaggcatattgtatgccgccgacatcgatgcggacgtcattaacatgtctctgggtggaggaggctataatcagagcatggatgaggctgttcttacagcagttgctcagggaaccattgtagtagcagcgactggcaatgatggtgcatcgtcgatcagttatcctgctgcctacagcagcgtcattgcggtgggatctgtgacgtccaatcgtacacgatcctcgttttctaactatggatctgggcttgaagttatggcaccgggcagcaacatctacagtacgtatcctaattccagatatacatctttgagtggtacaagcatggctactccgcacgttgcgggcgtagctgggctcattcgcgcagccaacccagacatatctgtcgcgcaagcccgtcagattctgcgggataccgcgcaagaagcaggatcgttcacacagtacggctatggaatcgtcgatgctcatgccgccgttgttgctgcatccggtggtagcggcggc

SEQ ID NO: 136 - protein, 413 aa, synthetic construct
  REGION 1..413: note = Variant of serine peptidase from Bacillus sinesaloumensis
MADQASQANGNQDVIEGELIVSVEPKNGKPDVSIQSAQSVTGQEDVLKSKGFTIVDTLHVEDSSVKPLVSKNFNKKVVEKMGLVYLVQYSPDQFKSSNIAKKELRKELMDLGFKVRYISENYKMMAIEGTATLQAVHPNQNWHYNMIKAPEAWAITSGSSSVKVAVLDTGIDHNHPSLANFVNTNLGRSFVGGNTMDVQGHGTHVAGTIASYGSVSGVMQSATLIPVKVLDNSGSGSLYGITQGILYAADIDADVINMSLGGGGYNQSMDEAVLTAVAQGTIVVAATGNDGASSISYPAAYSSVIAVGSVTSNRTRSSFSNYGSGLEVMAPGSNIYSTYPNSRYTSLSGTSMATPHVAGVAGLIRAANPDISVAQARQILRDTAQEAGSFTQYGYGIVDAHAAVVAASGGSGG

SEQ ID NO: 137 - DNA, 1239 bp, synthetic construct
  misc_feature 1..1239: note = Variant of serine peptidase from Bacillus sinesaloumensis
  source 1..1239: mol_type = other DNA
atggcagatcaagctagtcaagctaatggaaaccaggacgtcattgaaggcgagctgatcgtttcagtggaaccgaagaacggtaaacctgatgtgagcattcaaagtgcacaatccgtaacagggcaggaagacgtccttaaatcgaaaggctttacgatcgttgataccttgcatgtagaggatagcagcgtcaagccactcgtctcgaagaatttcaataagaaagtggtggagaagatgggactggtgtatcttgttcaatactctccggaccagtttaaaagttccaacattgcgaagaaagaactcagaaaagaattgatggatctgggctttaaagtccgctatataagcgaaaattacaagatgatggcgatcgaaggtacagccactcttcaggcagtacaccctaaccaaaactggcattataatatgattaaagctccggaagcgtgggctattacgtctggatcctctagcgttaaagtagcagtcctggatacagggatcgaccataatcacccatccttggccaacttcgtgaatactaatcttggccggtcgtttgttggaggaaacaccatggatgttcaaggtcatggcacacatgttgctggcacgattgcatcttatgggagtgtaagcggagtgatgcagagtgcgacactgatcccggtcaaagtgctcgtgaattctggcagcgggtccctttacggtattacgcaaggcatattgtatgccgccgacatcgatgcggacgtcattaacatgtctctgggtggaggaggctataatcagagcatggatgaggctgttcaaacagcagttgctcagggaaccattgtagtagcagcgactggcaatgatggtgcatcgtcgatcagttatcctgctgcctacagcagcgtcattgcggtgggatctgtgacgtccaatcgtacacgatcctcgttttctaactatggatctgggcttgaagttatggcaccgggcagcaacatctacagtacgtatcctaattccagatatacatctttgagtggtacaagcatggctactccgcacgttgcgggcgtagctgggctcattcgcgcagccaacccagacatatctgtcgcgcaagcccgtcagattctgcgggataccgcgcaagaagcaggatcgttcacacagtacggctatggaatcgtcgatgctcatgccgccgttgttgctgcatccggtggtagcggcggc

SEQ ID NO: 138 - protein, 413 aa, synthetic construct
  REGION 1..413: note = Variant of serine peptidase from Bacillus sinesaloumensis
MADQASQANGNQDVIEGELIVSVEPKNGKPDVSIQSAQSVTGQEDVLKSKGFTIVDTLHVEDSSVKPLVSKNFNKKVVEKMGLVYLVQYSPDQFKSSNIAKKELRKELMDLGFKVRYISENYKMMAIEGTATLQAVHPNQNWHYNMIKAPEAWAITSGSSSVKVAVLDTGIDHNHPSLANFVNTNLGRSFVGGNTMDVQGHGTHVAGTIASYGSVSGVMQSATLIPVKVLVNSGSGSLYGITQGILYAADIDADVINMSLGGGGYNQSMDEAVQTAVAQGTIVVAATGNDGASSISYPAAYSSVIAVGSVTSNRTRSSFSNYGSGLEVMAPGSNIYSTYPNSRYTSLSGTSMATPHVAGVAGLIRAANPDISVAQARQILRDTAQEAGSFTQYGYGIVDAHAAVVAASGGSGG

SEQ ID NO: 139 - DNA, 1239 bp, synthetic construct
  misc_feature 1..1239: note = Variant of serine peptidase from Bacillus sinesaloumensis
  source 1..1239: mol_type = other DNA
atggcagatcaagctagtcaagctaatggaaaccaggacgtcattgaaggcgagctgatcgtttcagtggaaccgaagaacggtaaacctgatgtgagcattcaaagtgcacaatccgtaacagggcaggaagacgtccttaaatcgaaaggctttacgatcgttgataccttgcatgtagaggatagcagcgtcaagccactcgtctcgaagaatttcaataagaaagtggtggagaagatgggactggtgtatcttgttcaatactctccggaccagtttaaaagttccaacattgcgaagaaagaactcagaaaagaattgatggatctgggctttaaagtccgctatataagcgaaaattacaagatgatggcgatcgaaggtacagccactcttcaggcagtacaccctaaccaaaactggcattataatatgattaaagctccggaagcgtgggctattacgtctggatcctctagcgttaaagtagcagtcctggatacagggatcgaccataatcacccatccttggccaacttcgtgaatactaatcttggccggtcgtttgttggaggaaacaccatggatgttcaaggtcatggcacacatgttgctggcacgattgcatcttatgggagtgtaagcggagtgatgcagagtgcgacactgatcccggtcaaagtgctcgataattctggcagcgggtccctttacggtattacgcaaggcatattgtatgccgccgacatcgatgcggacgtcattaacatgtctctgggtggaggaggctataatcagagcatggatgaggctgttcaaacagcagttgctcagggaaccattgtagtagcagcgactggcaatgatggtgcatcgtcgatcagttatcctgctgcctacagcagcgtcattgcggtgggatctgtgacgtccaatcgtcggcgatcctcgttttctaactatggatctgggcttgaagttatggcaccgggcagcaacatctacagtacgtatcctaattccagatatacatctttgagtggtacaagcatggctactccgcacgttgcgggcgtagctgggctcattcgcgcagccaacccagacatatctgtcgcgcaagcccgtcagattctgcgggataccgcgcaagaagcaggatcgttcacacagtacggctatggaatcgtcgatgctcatgccgccgttgttgctgcatccggtggtagcggcggc

SEQ ID NO: 140 - protein, 413 aa, synthetic construct
  REGION 1..413: note = Variant of serine peptidase from Bacillus sinesaloumensis
MADQASQANGNQDVIEGELIVSVEPKNGKPDVSIQSAQSVTGQEDVLKSKGFTIVDTLHVEDSSVKPLVSKNFNKKVVEKMGLVYLVQYSPDQFKSSNIAKKELRKELMDLGFKVRYISENYKMMAIEGTATLQAVHPNQNWHYNMIKAPEAWAITSGSSSVKVAVLDTGIDHNHPSLANFVNTNLGRSFVGGNTMDVQGHGTHVAGTIASYGSVSGVMQSATLIPVKVLDNSGSGSLYGITQGILYAADIDADVINMSLGGGGYNQSMDEAVQTAVAQGTIVVAATGNDGASSISYPAAYSSVIAVGSVTSNRRRSSFSNYGSGLEVMAPGSNIYSTYPNSRYTSLSGTSMATPHVAGVAGLIRAANPDISVAQARQILRDTAQEAGSFTQYGYGIVDAHAAVVAASGGSGG

SEQ ID NO: 141 - DNA, 1239 bp, synthetic construct
  misc_feature 1..1239: note = Variant of serine peptidase from Bacillus sinesaloumensis
  source 1..1239: mol_type = other DNA
atggcagatcaagctagtcaagctaatggaaaccaggacgtcattgaaggcgagctgatcgtttcagtggaaccgaagaacggtaaacctgatgtgagcattcaaagtgcacaatccgtaacagggcaggaagacgtccttaaatcgaaaggctttacgatcgttgataccttgcatgtagaggatagcagcgtcaagccactcgtctcgaagaatttcaataagaaagtggtggagaagatgggactggtgtatcttgttcaatactctccggaccagtttaaaagttccaacattgcgaagaaagaactcagaaaagaattgatggatctgggctttaaagtccgctatataagcgaaaattacaagatgatggcgatcgaaggtacagccactcttcaggcagtacaccctaaccaaaactggcattataatatgattaaagctccggaagcgtgggctattacgtctggatcctctagcgttaaagtagcagtcctggatacagggatcgaccataatcacccatccttggccaacttcgtgaatactaatcttggccggtcgtttgttggaggaaacaccatggatgttcaaggtcatggcacacatgttgctggcacgattgcatcttatgggagtgtaagcggagtgatgcagagtgcgacactgatcccggtcaaagtgctcgataattctggcagcgggtccctttacggtattacgcaaggcatattgtatgccgccgacatcgatgcggacgtcattaacatgtctctgggtggaggaggctataatcagagcatggatgaggctgttcaaacagcagttgctcagggaaccattgtagtagcagcgactggcaatgatggtgcatcgtcgatcagttatcctgctgcctacagcagcgtcattgcggtgggatctgtgacgtccaatcgtacacgatcctcgttttctaactatggatctgggcttgaagttatggcaccgggcagcaacatctacagtacgtatcctaattccagatatacatctttgagtggtacaagcatggctactccgcacgttgcgggcgtagctgggctcattcgcgcagccaacccagacatatctgtcgcgagtgcccgtcagattctgcgggataccgcgcaagaagcaggatcgttcacacagtacggctatggaatcgtcgatgctcatgccgccgttgttgctgcatccggtggtagcggcggc

SEQ ID NO: 142 - protein, 413 aa, synthetic construct
  REGION 1..413: note = Variant of serine peptidase from Bacillus sinesaloumensis
MADQASQANGNQDVIEGELIVSVEPKNGKPDVSIQSAQSVTGQEDVLKSKGFTIVDTLHVEDSSVKPLVSKNFNKKVVEKMGLVYLVQYSPDQFKSSNIAKKELRKELMDLGFKVRYISENYKMMAIEGTATLQAVHPNQNWHYNMIKAPEAWAITSGSSSVKVAVLDTGIDHNHPSLANFVNTNLGRSFVGGNTMDVQGHGTHVAGTIASYGSVSGVMQSATLIPVKVLDNSGSGSLYGITQGILYAADIDADVINMSLGGGGYNQSMDEAVQTAVAQGTIVVAATGNDGASSISYPAAYSSVIAVGSVTSNRTRSSFSNYGSGLEVMAPGSNIYSTYPNSRYTSLSGTSMATPHVAGVAGLIRAANPDISVASARQILRDTAQEAGSFTQYGYGIVDAHAAVVAASGGSGG

SEQ ID NO: 143 - DNA, 1239 bp, synthetic construct
  misc_feature 1..1239: note = Variant of serine peptidase from Bacillus sinesaloumensis
  source 1..1239: mol_type = other DNA
atggcagatcaagctagtcaagctaatggaaaccaggacgtcattgaaggcgagctgatcgtttcagtggaaccgaagaacggtaaacctgatgtgagcattcaaagtgcacaatccgtaacagggcaggaagacgtccttaaatcgaaaggctttacgatcgttgataccttgcatgtagaggatagcagcgtcaagccactcgtctcgaagaatttcaataagaaagtggtggagaagatgggactggtgtatcttgttcaatactctccggaccagtttaaaagttccaacattgcgaagaaagaactcagaaaagaattgatggatctgggctttaaagtccgctatataagcgaaaattacaagatgatggcgatcgaaggtacagccactcttcagacggtacaccctaaccaaaactggcattataatatgattaaagctccggaagcgtgggctattacgtctggatcctctagcgttaaagtagcagtcctggatacagggatcgaccataatcacccatccttggccaacttcgtgaatactaatcttggccggtcgtttgttggaggaaacaccatggatgttcaaggtcatggcacacatgttgctggcacgattgcatcttatgggagtgtaagcggagtgatgcagagtgcgacactgatcccggtcaaagtgctcgataattctggcagcgggtccctttacggtattacgcaaggcatattgtatgccgccgacatcgatgcggacgtcattaacatgtctctgggtggaggaggctataatcagagcatggatgaggctgttcaaacagcagttgctcagggaaccattgtagtagcagcgactggcaatgatggtgcatcgtcgatcagttatcctgctgcctacagcagcgtcattgcggtgggatctgtgacgtccaatcgtacacgatcctcgttttctaactatggatctgggcttgaagttatggcaccgggcagcaacatctacagtacgtatcctaattccagatatacatctttgagtggtacaagcatggctactccgcacgttgcgggcgtagctgggctcattcgcgcagccaacccagacatatctgtcgcgcaagcccgtcagattctgcgggataccgcgcaagaagcaggatcgttcacacagtacggctatggaatcgtcgatgctcatgccgccgttgttgctgcatccggtggtagcggcggc

SEQ ID NO: 144 - protein, 413 aa, synthetic construct
  REGION 1..413: note = Variant of serine peptidase from Bacillus sinesaloumensis
MADQASQANGNQDVIEGELIVSVEPKNGKPDVSIQSAQSVTGQEDVLKSKGFTIVDTLHVEDSSVKPLVSKNFNKKVVEKMGLVYLVQYSPDQFKSSNIAKKELRKELMDLGFKVRYISENYKMMAIEGTATLQTVHPNQNWHYNMIKAPEAWAITSGSSSVKVAVLDTGIDHNHPSLANFVNTNLGRSFVGGNTMDVQGHGTHVAGTIASYGSVSGVMQSATLIPVKVLDNSGSGSLYGITQGILYAADIDADVINMSLGGGGYNQSMDEAVQTAVAQGTIVVAATGNDGASSISYPAAYSSVIAVGSVTSNRTRSSFSNYGSGLEVMAPGSNIYSTYPNSRYTSLSGTSMATPHVAGVAGLIRAANPDISVAQARQILRDTAQEAGSFTQYGYGIVDAHAAVVAASGGSGG

SEQ ID NO: 145 - DNA, 1239 bp, synthetic construct
  misc_feature 1..1239: note = Variant of serine peptidase from Bacillus sinesaloumensis
  source 1..1239: mol_type = other DNA
atggcagatcaagctagtcaagctaatggaaaccaggacgtcattgaaggcgagctgatcgtttcagtggaaccgaagaacggtaaacctgatgtgagcattcaaagtgcacaatccgtaacagggcaggaagacgtccttaaatcgaaaggctttacgatcgttgataccttgcatgtagaggatagcagcgtcaagccactcgtctcgaagaatttcaataagaaagtggtggagaagatgggactggtgtatcttgttcaatactctccggaccagtttaaaagttccaacattgcgaagaaagaactcagaaaagaattgatggatctgggctttaaagtccgctatataagcgaaaattacaagatgatggcgatcgaaggtacagccactcttcaggcagtacaccctaaccaaaactggcattataatatgattaaagctccggaagcgtgggctattacgtctggatcctctagcgttaaagtagcagtcctggatacagggatcgaccataatcacccatccttggccaacttcgtgaatactggtcttggccggtcgtttgttggaggaaacaccatggatgttcaaggtcatggcacacatgttgctggcacgattgcatcttatgggagtgtaagcggagtgatgcagagtgcgacactgatcccggtcaaagtgctcgataattctggcagcgggtccctttacggtattacgcaaggcatattgtatgccgccgacatcgatgcggacgtcattaacatgtctctgggtggaggaggctataatcagagcatggatgaggctgttcaaacagcagttgctcagggaaccattgtagtagcagcgactggcaatgatggtgcatcgtcgatcagttatcctgctgcctacagcagcgtcattgcggtgggatctgtgacgtccaatcgtacacgatcctcgttttctaactatggatctgggcttgaagttatggcaccgggcagcaacatctacagtacgtatcctaattccagatatacatctttgagtggtacaagcatggctactccgcacgttgcgggcgtagctgggctcattcgcgcagccaacccagacatatctgtcgcgcaagcccgtcagattctgcgggataccgcgcaagaagcaggatcgttcacacagtacggctatggaatcgtcgatgctcatgccgccgttgttgctgcatccggtggtagcggcggc

SEQ ID NO: 146 - protein, 413 aa, synthetic construct
  REGION 1..413: note = Variant of serine peptidase from Bacillus sinesaloumensis
MADQASQANGNQDVIEGELIVSVEPKNGKPDVSIQSAQSVTGQEDVLKSKGFTIVDTLHVEDSSVKPLVSKNFNKKVVEKMGLVYLVQYSPDQFKSSNIAKKELRKELMDLGFKVRYISENYKMMAIEGTATLQAVHPNQNWHYNMIKAPEAWAITSGSSSVKVAVLDTGIDHNHPSLANFVNTGLGRSFVGGNTMDVQGHGTHVAGTIASYGSVSGVMQSATLIPVKVLDNSGSGSLYGITQGILYAADIDADVINMSLGGGGYNQSMDEAVQTAVAQGTIVVAATGNDGASSISYPAAYSSVIAVGSVTSNRTRSSFSNYGSGLEVMAPGSNIYSTYPNSRYTSLSGTSMATPHVAGVAGLIRAANPDISVAQARQILRDTAQEAGSFTQYGYGIVDAHAAVVAASGGSGG

SEQ ID NO: 147 - DNA, 1239 bp, synthetic construct
  misc_feature 1..1239: note = Variant of serine peptidase from Bacillus sinesaloumensis
  source 1..1239: mol_type = other DNA
atggcagatcaagctagtcaagctaatggaaaccaggacgtcattgaaggcgagctgatcgtttcagtggaaccgaagaacggtaaacctgatgtgagcattcaaagtgcacaatccgtaacagggcaggaagacgtccttaaatcgaaaggctttacgatcgttgataccttgcatgtagaggatagcagcgtcaagccactcgtctcgaagaatttcaataagaaagtggtggagaagatgggactggtgtatcttgttcaatactctccggaccagtttaaaagttccaacattgcgaagaaagaactcagaaaagaattgatggatctgggctttaaagtccgctatataagcgaaaattacaagatgatggcgatcgaaggtacagccactcttcagcgggtacaccctaaccaaaactggcattataatatgattaaagctccggaagcgtgggctattacgtctggatcctctagcgttaaagtagcagtcctggatacagggatcgaccataatcacccatccttggccaacttcgtgaatactaatcttggccggtcgtttgttggaggaaacaccatggatgttcaaggtcatggcacacatgttgctggcacgattgcatcttatgggagtgtaagcggagtgatgcagagtgcgacactgatcccggtcaaagtgctcgataattctggcagcgggtccctttacggtattacgcaaggcatattgtatgccgccgacatcgatgcggacgtcattaacatgtctctgggtggaggaggctataatcagagcatggatgaggctgttcaaacagcagttgctcagggaaccattgtagtagcagcgactggcaatgatggtgcatcgtcgatcagttatcctgctgcctacagcagcgtcattgcggtgggatctgtgacgtccaatcgtacacgatcctcgttttctaactatggatctgggcttgaagttatggcaccgggcagcaacatctacagtacgtatcctaattccagatatacatctttgagtggtacaagcatggctactccgcacgttgcgggcgtagctgggctcattcgcgcagccaacccagacatatctgtcgcgcaagcccgtcagattctgcgggataccgcgcaagaagcaggatcgttcacacagtacggctatggaatcgtcgatgctcatgccgccgttgttgctgcatccggtggtagcggcggc

SEQ ID NO: 148 - protein, 413 aa, synthetic construct
  REGION 1..413: note = Variant of serine peptidase from Bacillus sinesaloumensis
MADQASQANGNQDVIEGELIVSVEPKNGKPDVSIQSAQSVTGQEDVLKSKGFTIVDTLHVEDSSVKPLVSKNFNKKVVEKMGLVYLVQYSPDQFKSSNIAKKELRKELMDLGFKVRYISENYKMMAIEGTATLQRVHPNQNWHYNMIKAPEAWAITSGSSSVKVAVLDTGIDHNHPSLANFVNTNLGRSFVGGNTMDVQGHGTHVAGTIASYGSVSGVMQSATLIPVKVLDNSGSGSLYGITQGILYAADIDADVINMSLGGGGYNQSMDEAVQTAVAQGTIVVAATGNDGASSISYPAAYSSVIAVGSVTSNRTRSSFSNYGSGLEVMAPGSNIYSTYPNSRYTSLSGTSMATPHVAGVAGLIRAANPDISVAQARQILRDTAQEAGSFTQYGYGIVDAHAAVVAASGGSGG

SEQ ID NO: 149 - DNA, 1239 bp, synthetic construct
  misc_feature 1..1239: note = Variant of serine peptidase from Bacillus sinesaloumensis
  source 1..1239: mol_type = other DNA
atggcagatcaagctagtcaagctaatggaaaccaggacgtcattgaaggcgagctgatcgtttcagtggaaccgaagaacggtaaacctgatgtgagcattcaaagtgcacaatccgtaacagggcaggaagacgtccttaaatcgaaaggctttacgatcgttgataccttgcatgtagaggatagcagcgtcaagccactcgtctcgaagaatttcaataagaaagtggtggagaagatgggactggtgtatcttgttcaatactctccggaccagtttaaaagttccaacattgcgaagaaagaactcagaaaagaattgatggatctgggctttaaagtccgctatataagcgaaaattacaagatgatggcgatcgaaggtacagccactcttcaggcagtacaccctaaccaaaactggcattataatatgattaaagctccggaagcgtgggctattacgtctggatcctctagcgttaaagtagcagtcctggatacagggatcgaccataatcacccatccttggccaacttcgtgaatactaatcttggccggtcgtttgttggaggaaacaccatggatgttcaaggtcatggcacacatgttgctggcacgattgcatcttatgggagtgtaagcggagtgatgcagagtgcgacactgatcccggtcaaagtgctcgataattctggcagcgggtccctttacggtattacgcaaggcatattgtatgccgccgacatcgatgcggacgtcattaacatgtctctgggtggaggaggctataatcagagcatggatgaggctgttcaaacagcagatgctcagggaaccattgtagtagcagcgactggcaatgatggtgcatcgtcgatcagttatcctgctgcctacagcagcgtcattgcggtgggatctgtgacgtccaatcgtacacgatcctcgttttctaactatggatctgggcttgaagttatggcaccgggcagcaacatctacagtacgtatcctaattccagatatacatctttgagtggtacaagcatggctactccgcacgttgcgggcgtagctgggctcattcgcgcagccaacccagacatatctgtcgcgcaagcccgtcagattctgcgggataccgcgcaagaagcaggatcgttcacacagtacggctatggaatcgtcgatgctcatgccgccgttgttgctgcatccggtggtagcggcggc

SEQ ID NO: 150 - protein, 413 aa, synthetic construct
  REGION 1..413: note = Variant of serine peptidase from Bacillus sinesaloumensis
MADQASQANGNQDVIEGELIVSVEPKNGKPDVSIQSAQSVTGQEDVLKSKGFTIVDTLHVEDSSVKPLVSKNFNKKVVEKMGLVYLVQYSPDQFKSSNIAKKELRKELMDLGFKVRYISENYKMMAIEGTATLQAVHPNQNWHYNMIKAPEAWAITSGSSSVKVAVLDTGIDHNHPSLANFVNTNLGRSFVGGNTMDVQGHGTHVAGTIASYGSVSGVMQSATLIPVKVLDNSGSGSLYGITQGILYAADIDADVINMSLGGGGYNQSMDEAVQTADAQGTIVVAATGNDGASSISYPAAYSSVIAVGSVTSNRTRSSFSNYGSGLEVMAPGSNIYSTYPNSRYTSLSGTSMATPHVAGVAGLIRAANPDISVAQARQILRDTAQEAGSFTQYGYGIVDAHAAVVAASGGSGG

SEQ ID NO: 151 - DNA, 1239 bp, synthetic construct
  misc_feature 1..1239: note = Variant of serine peptidase from Bacillus sinesaloumensis
  source 1..1239: mol_type = other DNA
atggcagatcaagctagtcaagctaatggaaaccaggacgtcattgaaggcgagctgatcgtttcagtggaaccgaagaacggtaaacctgatgtgagcattcaaagtgcacaatccgtaacagggcaggaagacgtccttaaatcgaaaggctttacgatcgttgataccttgcatgtagaggatagcagcgtcaagccactcgtctcgaagaatttcaataagaaagtggtggagaagatgggactggtgtatcttgttcaatactctccggaccagtttaaaagttccaacattgcgaagaaagaactcagaaaagaattgatggatctgggctttaaagtccgctatataagcgaaaattacaagatgatggcgatccctggtacagccactcttcaggcagtacaccctaaccaaaactggcattataatatgattaaagctccggaagcgtgggctattacgtctggatcctctagcgttaaagtagcagtcctggatacagggatcgaccataatcacccatccttggccaacttcgtgaatactaatcttggccggtcgtttgttggaggaaacaccatggatgttcaaggtcatggcacacatgttgctggcacgattgcatcttatgggagtgtaagcggagtgatgcagagtgcgacactgatcccggtcaaagtgctcgataattctggcagcgggtccctttacggtattacgcaaggcatattgtatgccgccgacatcgatgcggacgtcattaacatgtctctgggtggaggaggctataatcagagcatggatgaggctgttcaaacagcagttgctcagggaaccattgtagtagcagcgactggcaatgatggtgcatcgtcgatcagttatcctgctgcctacagcagcgtcattgcggtgggatctgtgacgtccaatcgtacacgatcctcgttttctaactatggatctgggcttgaagttatggcaccgggcagcaacatctacagtacgtatcctaattccagatatacatctttgagtggtacaagcatggctactccgcacgttgcgggcgtagctgggctcattcgcgcagccaacccagacatatctgtcgcgcaagcccgtcagattctgcgggataccgcgcaagaagcaggatcgttcacacagtacggctatggaatcgtcgatgctcatgccgccgttgttgctgcatccggtggtagcggcggc

SEQ ID NO: 152 - protein, 413 aa, synthetic construct
  REGION 1..413: note = Variant of serine peptidase from Bacillus sinesaloumensis
MADQASQANGNQDVIEGELIVSVEPKNGKPDVSIQSAQSVTGQEDVLKSKGFTIVDTLHVEDSSVKPLVSKNFNKKVVEKMGLVYLVQYSPDQFKSSNIAKKELRKELMDLGFKVRYISENYKMMAIPGTATLQAVHPNQNWHYNMIKAPEAWAITSGSSSVKVAVLDTGIDHNHPSLANFVNTNLGRSFVGGNTMDVQGHGTHVAGTIASYGSVSGVMQSATLIPVKVLDNSGSGSLYGITQGILYAADIDADVINMSLGGGGYNQSMDEAVQTAVAQGTIVVAATGNDGASSISYPAAYSSVIAVGSVTSNRTRSSFSNYGSGLEVMAPGSNIYSTYPNSRYTSLSGTSMATPHVAGVAGLIRAANPDISVAQARQILRDTAQEAGSFTQYGYGIVDAHAAVVAASGGSGG

SEQ ID NO: 153 - DNA, 1239 bp, synthetic construct
  misc_feature 1..1239: note = Variant of serine peptidase from Bacillus sinesaloumensis
  source 1..1239: mol_type = other DNA
atggcagatcaagctagtcaagctaatggaaaccaggacgtcattgaaggcgagctgatcgtttcagtggaaccgaagaacggtaaacctgatgtgagcattcaaagtgcacaatccgtaacagggcaggaagacgtccttaaatcgaaaggctttacgatcgttgataccttgcatgtagaggatagcagcgtcaagccactcgtctcgaagaatttcaataagaaagtggtggagaagatgggactggtgtatcttgttcaatactctccggaccagtttaaaagttccaacattgcgaagaaagaactcagaaaagaattgatggatctgggctttaaagtccgctatataagcgaaaattacaagatgatggcgatcgaaggtacagcccgtcttcaggcagtacaccctaaccaaaactggcattataatatgattaaagctccggaagcgtgggctattacgtctggatcctctagcgttaaagtagcagtcctggatacagggatcgaccataatcacccatccttggccaacttcgtgaatactaatcttggccggtcgtttgttggaggaaacaccatggatgttcaaggtcatggcacacatgttgctggcacgattgcatcttatgggagtgtaagcggagtgatgcagagtgcgacactgatcccggtcaaagtgctcgataattctggcagcgggtccctttacggtattacgcaaggcatattgtatgccgccgacatcgatgcggacgtcattaacatgtctctgggtggaggaggctataatcagagcatggatgaggctgttcaaacagcagttgctcagggaaccattgtagtagcagcgactggcaatgatggtgcatcgtcgatcagttatcctgctgcctacagcagcgtcattgcggtgggatctgtgacgtccaatcgtacacgatcctcgttttctaactatggatctgggcttgaagttatggcaccgggcagcaacatctacagtacgtatcctaattccagatatacatctttgagtggtacaagcatggctactccgcacgttgcgggcgtagctgggctcattcgcgcagccaacccagacatatctgtcgcgcaagcccgtcagattctgcgggataccgcgcaagaagcaggatcgttcacacagtacggctatggaatcgtcgatgctcatgccgccgttgttgctgcatccggtggtagcggcggc

SEQ ID NO: 154 - protein, 413 aa, synthetic construct
  REGION 1..413: note = Variant of serine peptidase from Bacillus sinesaloumensis
MADQASQANGNQDVIEGELIVSVEPKNGKPDVSIQSAQSVTGQEDVLKSKGFTIVDTLHVEDSSVKPLVSKNFNKKVVEKMGLVYLVQYSPDQFKSSNIAKKELRKELMDLGFKVRYISENYKMMAIEGTARLQAVHPNQNWHYNMIKAPEAWAITSGSSSVKVAVLDTGIDHNHPSLANFVNTNLGRSFVGGNTMDVQGHGTHVAGTIASYGSVSGVMQSATLIPVKVLDNSGSGSLYGITQGILYAADIDADVINMSLGGGGYNQSMDEAVQTAVAQGTIVVAATGNDGASSISYPAAYSSVIAVGSVTSNRTRSSFSNYGSGLEVMAPGSNIYSTYPNSRYTSLSGTSMATPHVAGVAGLIRAANPDISVAQARQILRDTAQEAGSFTQYGYGIVDAHAAVVAASGGSGG

SEQ ID NO: 155 - DNA, 1239 bp, synthetic construct
  misc_feature 1..1239: note = Variant of serine peptidase from Bacillus sinesaloumensis
  source 1..1239: mol_type = other DNA
atggcagatcaagctagtcaagctaatggaaaccaggacgtcattgaaggcgagctgatcgtttcagtggaaccgaagaacggtaaacctgatgtgagcattcaaagtgcacaatccgtaacagggcaggaagacgtccttaaatcgaaaggctttacgatcgttgataccttgcatgtagaggatagcagcgtcaagccactcgtctcgaagaatttcaataagaaagtggtggagaagatgggactggtgtatcttgttcaatactctccggaccagtttaaaagttccaacattgcgaagaaagaactcagaaaagaattgatggatctgggctttaaagtccgctatataagcgaaaattacaagatgatggcgatcgaaggtacagccactcttcaggcagtacaccctaaccaaaactggcattataatatgattaaagctccggaagcgtgggctattacgtctggatcctctagcgttaaagtagcagtcctggatacagggatcgaccataatcacccatccttggccaacttcgtgaatactaatcttggccggtcgtttgttggaggaaacaccatggatgttcaaggtcatggcacacatgttgctggcacgattgcatcttatgggagtgtaagcggagtgatgcagagtgcgacactgatcccggtcaaagtgctcgataattctggcagcgggtccctttacggtattacgcaaggcatattgtatgccgccgacatcgatgcggacgtcattaacatgtctctgggtggaggaggctataatcagagcatggatgaggctgttcaaacagcagttgctcagggaaccattgtagtagcagcgactggcaatgatggtgcatcgtcgatcagttatcctgctgcctacagcagcgtcattgcggtgggatctgtgacgtccaatcgtacacgatcctcgttttctaactatggatctgggcttgaagttatggcaccgggcagcaacatctacagtacgtatcctaattccagatatacatctttgagtggtacaagcatggctactccgcacgttgcgggcgtagctgggctcattcgcgcagccaacattgacatatctgtcgcgcaagcccgtcagattctgcgggataccgcgcaagaagcaggatcgttcacacagtacggctatggaatcgtcgatgctcatgccgccgttgttgctgcatccggtggtagcggcggc

SEQ ID NO: 156 - protein, 413 aa, synthetic construct
  REGION 1..413: note = Variant of serine peptidase from Bacillus sinesaloumensis
MADQASQANGNQDVIEGELIVSVEPKNGKPDVSIQSAQSVTGQEDVLKSKGFTIVDTLHVEDSSVKPLVSKNFNKKVVEKMGLVYLVQYSPDQFKSSNIAKKELRKELMDLGFKVRYISENYKMMAIEGTATLQAVHPNQNWHYNMIKAPEAWAITSGSSSVKVAVLDTGIDHNHPSLANFVNTNLGRSFVGGNTMDVQGHGTHVAGTIASYGSVSGVMQSATLIPVKVLDNSGSGSLYGITQGILYAADIDADVINMSLGGGGYNQSMDEAVQTAVAQGTIVVAATGNDGASSISYPAAYSSVIAVGSVTSNRTRSSFSNYGSGLEVMAPGSNIYSTYPNSRYTSLSGTSMATPHVAGVAGLIRAANIDISVAQARQILRDTAQEAGSFTQYGYGIVDAHAAVVAASGGSGG

SEQ ID NO: 157 - DNA, 1239 bp, synthetic construct
  misc_feature 1..1239: note = Variant of serine peptidase from Bacillus sinesaloumensis
  source 1..1239: mol_type = other DNA
atggcagatcaagctagtcaagctaatggaaaccaggacgtcattgaaggcgagctgatcgtttcagtggaaccgaagaacggtaaacctgatgtgagcattcaaagtgcacaatccgtaacagggcaggaagacgtccttaaatcgaaaggctttacgatcgttgataccttgcatgtagaggatagcagcgtcaagccactcgtctcgaagaatttcaataagaaagtggtggagaagatgggactggtgtatcttgttcaatactctccggaccagtttaaaagttccaacattgcgaagaaagaactcagaaaagaattgatggatctgggctttaaagtccgctatataagcgaaaattacaagatgatggcgatcgaaggtacagccactcttcaggcagtacaccctaaccaaaactggcattataatatgattaaagctccggaagcgtgggctattacgtctggatcctctagcgttaaagtagcagtcctggatacagggatcgaccataatcacccatccttggccaacttcgtgaatactaatcttggccggtcgtttgttggaggaaacaccatggatgttcaaggtcatggcacacatgttgctggcacgattgcatcttatgggagtgtaagcggagtgatgcagagtgcgacactgatcccggtcaaagtgctcgataattctggcagcgggtccctttacggtattacgcaaggcatattgtatgccgccgacatcgatgcggacgtcattaacatgtctctgggtggaggatgttataatcagagcatggatgaggctgttcaaacagcagttgctcagggaaccattgtagtagcagcgactggcaatgatggtgcatcgtcgatcagttatcctgctgcctacagcagcgtcattgcggtgggatctgtgacgtccaatcgtacacgatcctcgttttctaactatggatctgggcttgaagttatggcaccgggcagcaacatctacagtacgtatcctaattccagatatacatctttgagtggtacaagcatggctactccgcacgttgcgggcgtagctgggctcattcgcgcagccaacccagacatatctgtcgcgcaagcccgtcagattctgcgggataccgcgcaagaagcaggatcgttcacacagtacggctatggaatcgtcgatgctcatgccgccgttgttgctgcatccggtggtagcggcggc

SEQ ID NO: 158 - protein, 413 aa, synthetic construct
  REGION 1..413: note = Variant of serine peptidase from Bacillus sinesaloumensis
MADQASQANGNQDVIEGELIVSVEPKNGKPDVSIQSAQSVTGQEDVLKSKGFTIVDTLHVEDSSVKPLVSKNFNKKVVEKMGLVYLVQYSPDQFKSSNIAKKELRKELMDLGFKVRYISENYKMMAIEGTATLQAVHPNQNWHYNMIKAPEAWAITSGSSSVKVAVLDTGIDHNHPSLANFVNTNLGRSFVGGNTMDVQGHGTHVAGTIASYGSVSGVMQSATLIPVKVLDNSGSGSLYGITQGILYAADIDADVINMSLGGGCYNQSMDEAVQTAVAQGTIVVAATGNDGASSISYPAAYSSVIAVGSVTSNRTRSSFSNYGSGLEVMAPGSNIYSTYPNSRYTSLSGTSMATPHVAGVAGLIRAANPDISVAQARQILRDTAQEAGSFTQYGYGIVDAHAAVVAASGGSGG

SEQ ID NO: 159 - DNA, 1239 bp, synthetic construct
  misc_feature 1..1239: note = Variant of serine peptidase from Bacillus sinesaloumensis
  source 1..1239: mol_type = other DNA
atggcagatcaagctagtcaagctaatggaaaccaggacgtcattgaaggcgagctgatcgtttcagtggaaccgaagaacggtaaacctgatgtgagcattcaaagtgcacaatccgtaacagggcaggaagacgtccttaaatcgaaaggctttacgatcgttgataccttgcatgtagaggatagcagcgtcaagccactcgtctcgaagaatttcaataagaaagtggtggagaagatgggactggtgtatcttgttcaatactctccggaccagtttaaaagttccaacattgcgaagaaagaactcagaaaagaattgatggatctgggctttaaagtccgctatataagcgaaaattacaagatgatggcgatcgaaggtacagccactcttcaggcagtacaccctaaccaaaactggcattataatatgattaaagctccggaagcgtgggctattacgtctggatcctctagcgttaaagtagcagtcctggatacagggatcgaccataatcacccatccttggccaacttcgtgaatactaatcttggccggtcgtttgttggaggaaacaccatggatgttcaaggtcatggcacacatgttgctggcacgattgcatcttatgggagtgtaagcggagtgatgcagagtgcgacactgatcccggtcaaagtgctcgataattctggcagcgggtccctttacggtattacgcaaggcatattgtatgccgccgacatcgatgcggacgtcattaacatgtctctgggtggaggaggctataatcagagcatggatgaggctgttcaaacagcagttgctcagggaaccattgtagtagcagcgactggcaatgatggtgcatcgtcgatcagttatcctgctgcctacagcagcgtcattgcggtgggatctgtgacgtccaatcgtcatcgatcctcgttttctaactatggatctgggcttgaagttatggcaccgggcagcaacatctacagtacgtatcctaattccagatatacatctttgagtggtacaagcatggctactccgcacgttgcgggcgtagctgggctcattcgcgcagccaacccagacatatctgtcgcgcaagcccgtcagattctgcgggataccgcgcaagaagcaggatcgttcacacagtacggctatggaatcgtcgatgctcatgccgccgttgttgctgcatccggtggtagcggcggc

SEQ ID NO: 160 - protein, 413 aa, synthetic construct
  REGION 1..413: note = Variant of serine peptidase from Bacillus sinesaloumensis
MADQASQANGNQDVIEGELIVSVEPKNGKPDVSIQSAQSVTGQEDVLKSKGFTIVDTLHVEDSSVKPLVSKNFNKKVVEKMGLVYLVQYSPDQFKSSNIAKKELRKELMDLGFKVRYISENYKMMAIEGTATLQAVHPNQNWHYNMIKAPEAWAITSGSSSVKVAVLDTGIDHNHPSLANFVNTNLGRSFVGGNTMDVQGHGTHVAGTIASYGSVSGVMQSATLIPVKVLDNSGSGSLYGITQGILYAADIDADVINMSLGGGGYNQSMDEAVQTAVAQGTIVVAATGNDGASSISYPAAYSSVIAVGSVTSNRHRSSFSNYGSGLEVMAPGSNIYSTYPNSRYTSLSGTSMATPHVAGVAGLIRAANPDISVAQARQILRDTAQEAGSFTQYGYGIVDAHAAVVAASGGSGG

SEQ ID NO: 161 - DNA, 1239 bp, synthetic construct
  misc_feature 1..1239: note = Variant of serine peptidase from Bacillus sinesaloumensis
  source 1..1239: mol_type = other DNA
atggcagatcaagctagtcaagctaatggaaaccaggacgtcattgaaggcgagctgatcgtttcagtggaaccgaagaacggtaaacctgatgtgagcattcaaagtgcacaatccgtaacagggcaggaagacgtccttaaatcgaaaggctttacgatcgttgataccttgcatgtagaggatagcagcgtcaagccactcgtctcgaagaatttcaataagaaagtggtggagaagatgggactggtgtatcttgttcaatactctccggaccagtttaaaagttccaacattgcgaagaaagaactcagaaaagaattgatggatctgggctttaaagtccgctatataagcgaaaattacaagatgatggcgatcgaaggtacagccactcttcaggcagtacaccctaaccaaaactggcattataatatgattaaagctccggaagcgtgggctattacgtctggatcctctagcgttaaagtagcagtcctggatacagggatcgaccataatcacccatccttggccaacttcgtgaatactaatcttggccggtcgtttgttggaggaaacaccatggatgttcaaggtcatggcacacatgttgctggcacgattgcatcttatgggagtgtaagcggagtgatgcagagtgcgacactgatcccggtcaaagtgctcgataattctggcagcgggtccctttacggtattacgcaaggcatattgtatgccgccgactctgatgcggacgtcattaacatgtctctgggtggaggaggctataatcagagcatggatgaggctgttcaaacagcagttgctcagggaaccattgtagtagcagcgactggcaatgatggtgcatcgtcgatcagttatcctgctgcctacagcagcgtcattgcggtgggatctgtgacgtccaatcgtacacgatcctcgttttctaactatggatctgggcttgaagttatggcaccgggcagcaacatctacagtacgtatcctaattccagatatacatctttgagtggtacaagcatggctactccgcacgttgcgggcgtagctgggctcattcgcgcagccaacccagacatatctgtcgcgcaagcccgtcagattctgcgggataccgcgcaagaagcaggatcgttcacacagtacggctatggaatcgtcgatgctcatgccgccgttgttgctgcatccggtggtagcggcggc

SEQ ID NO: 162 - protein, 413 aa, synthetic construct
  REGION 1..413: note = Variant of serine peptidase from Bacillus sinesaloumensis
MADQASQANGNQDVIEGELIVSVEPKNGKPDVSIQSAQSVTGQEDVLKSKGFTIVDTLHVEDSSVKPLVSKNFNKKVVEKMGLVYLVQYSPDQFKSSNIAKKELRKELMDLGFKVRYISENYKMMAIEGTATLQAVHPNQNWHYNMIKAPEAWAITSGSSSVKVAVLDTGIDHNHPSLANFVNTNLGRSFVGGNTMDVQGHGTHVAGTIASYGSVSGVMQSATLIPVKVLDNSGSGSLYGITQGILYAADSDADVINMSLGGGGYNQSMDEAVQTAVAQGTIVVAATGNDGASSISYPAAYSSVIAVGSVTSNRTRSSFSNYGSGLEVMAPGSNIYSTYPNSRYTSLSGTSMATPHVAGVAGLIRAANPDISVAQARQILRDTAQEAGSFTQYGYGIVDAHAAVVAASGGSGG

SEQ ID NO: 163 - DNA, 1239 bp, synthetic construct
  misc_feature 1..1239: note = Variant of serine peptidase from Bacillus sinesaloumensis
  source 1..1239: mol_type = other DNA
atggcagatcaagctagtcaagctaatggaaaccaggacgtcattgaaggcgagctgatcgtttcagtggaaccgaagaacggtaaacctgatgtgagcattcaaagtgcacaatccgtaacagggcaggaagacgtccttaaatcgaaaggctttacgatcgttgataccttgcatgtagaggatagcagcgtcaagccactcgtctcgaagaatttcaataagaaagtggtggagaagatgggactggtgtatcttgttcaatactctccggaccagtttaaaagttccaacattgcgaagaaagaactcagaaaagaattgatggatctgggctttaaagtccgctatataagcgaaaattacaagatgatggcgatcgaaggtacagccactcttcaggcaattcaccctaaccaaaactggcattataatatgattaaagctccggaagcgtgggctattacgtctggatcctctagcgttaaagtagcagtcctggatacagggatcgaccataatcacccatccttggccaacttcgtgaatactaatcttggccggtcgtttgttggaggaaacaccatggatgttcaaggtcatggcacacatgttgctggcacgattgcatcttatgggagtgtaagcggagtgatgcagagtgcgacactgatcccggtcaaagtgctcgataattctggcagcgggtccctttacggtattacgcaaggcatattgtatgccgccgacatcgatgcggacgtcattaacatgtctctgggtggaggaggctataatcagagcatggatgaggctgttcaaacagcagttgctcagggaaccattgtagtagcagcgactggcaatgatggtgcatcgtcgatcagttatcctgctgcctacagcagcgtcattgcggtgggatctgtgacgtccaatcgtacacgatcctcgttttctaactatggatctgggcttgaagttatggcaccgggcagcaacatctacagtacgtatcctaattccagatatacatctttgagtggtacaagcatggctactccgcacgttgcgggcgtagctgggctcattcgcgcagccaacccagacatatctgtcgcgcaagcccgtcagattctgcgggataccgcgcaagaagcaggatcgttcacacagtacggctatggaatcgtcgatgctcatgccgccgttgttgctgcatccggtggtagcggcggc

SEQ ID NO: 164 - protein, 413 aa, synthetic construct
  REGION 1..413: note = Variant of serine peptidase from Bacillus sinesaloumensis
MADQASQANGNQDVIEGELIVSVEPKNGKPDVSIQSAQSVTGQEDVLKSKGFTIVDTLHVEDSSVKPLVSKNFNKKVVEKMGLVYLVQYSPDQFKSSNIAKKELRKELMDLGFKVRYISENYKMMAIEGTATLQAIHPNQNWHYNMIKAPEAWAITSGSSSVKVAVLDTGIDHNHPSLANFVNTNLGRSFVGGNTMDVQGHGTHVAGTIASYGSVSGVMQSATLIPVKVLDNSGSGSLYGITQGILYAADIDADVINMSLGGGGYNQSMDEAVQTAVAQGTIVVAATGNDGASSISYPAAYSSVIAVGSVTSNRTRSSFSNYGSGLEVMAPGSNIYSTYPNSRYTSLSGTSMATPHVAGVAGLIRAANPDISVAQARQILRDTAQEAGSFTQYGYGIVDAHAAVVAASGGSGG

SEQ ID NO: 165 - DNA, 1239 bp, synthetic construct
  misc_feature 1..1239: note = Variant of serine peptidase from Bacillus sinesaloumensis
  source 1..1239: mol_type = other DNA
atggcagatcaagctagtcaagctaatggaaaccaggacgtcattgaaggcgagctgatcgtttcagtggaaccgaagaacggtaaacctgatgtgagcattcaaagtgcacaatccgtaacagggcaggaagacgtccttaaatcgaaaggctttacgatcgttgataccttgcatgtagaggatagcagcgtcaagccactcgtctcgaagaatttcaataagaaagtggtggagaagatgggactggtgtatcttgttcaatactctccggaccagtttaaaagttccaacattgcgaagaaagaactcagaaaagaattgatggatctgggctttaaagtccgctatataagcgaaaattacaagatgatggcgatcgaaggtacagccactcttcaggcagtacaccctaaccaaaactggcattataatatgattaaagctccggaagcgtgggctattacgtctggatccccgagcgttaaagtagcagtcctggatacagggatcgaccataatcacccatccttggccaacttcgtgaatactaatcttggccggtcgtttgttggaggaaacaccatggatgttcaaggtcatggcacacatgttgctggcacgattgcatcttatgggagtgtaagcggagtgatgcagagtgcgacactgatcccggtcaaagtgctcgataattctggcagcgggtccctttacggtattacgcaaggcatattgtatgccgccgacatcgatgcggacgtcattaacatgtctctgggtggaggaggctataatcagagcatggatgaggctgttcaaacagcagttgctcagggaaccattgtagtagcagcgactggcaatgatggtgcatcgtcgatcagttatcctgctgcctacagcagcgtcattgcggtgggatctgtgacgtccaatcgtacacgatcctcgttttctaactatggatctgggcttgaagttatggcaccgggcagcaacatctacagtacgtatcctaattccagatatacatctttgagtggtacaagcatggctactccgcacgttgcgggcgtagctgggctcattcgcgcagccaacccagacatatctgtcgcgcaagcccgtcagattctgcgggataccgcgcaagaagcaggatcgttcacacagtacggctatggaatcgtcgatgctcatgccgccgttgttgctgcatccggtggtagcggcggc

SEQ ID NO: 166 - protein, 413 aa, synthetic construct
  REGION 1..413: note = Variant of serine peptidase from Bacillus sinesaloumensis
MADQASQANGNQDVIEGELIVSVEPKNGKPDVSIQSAQSVTGQEDVLKSKGFTIVDTLHVEDSSVKPLVSKNFNKKVVEKMGLVYLVQYSPDQFKSSNIAKKELRKELMDLGFKVRYISENYKMMAIEGTATLQAVHPNQNWHYNMIKAPEAWAITSGSPSVKVAVLDTGIDHNHPSLANFVNTNLGRSFVGGNTMDVQGHGTHVAGTIASYGSVSGVMQSATLIPVKVLDNSGSGSLYGITQGILYAADIDADVINMSLGGGGYNQSMDEAVQTAVAQGTIVVAATGNDGASSISYPAAYSSVIAVGSVTSNRTRSSFSNYGSGLEVMAPGSNIYSTYPNSRYTSLSGTSMATPHVAGVAGLIRAANPDISVAQARQILRDTAQEAGSFTQYGYGIVDAHAAVVAASGGSGG

SEQ ID NO: 167 - DNA, 1239 bp, synthetic construct
  misc_feature 1..1239: note = Variant of serine peptidase from Bacillus sinesaloumensis
  source 1..1239: mol_type = other DNA
atggcagatcaagctagtcaagctaatggaaaccaggacgtcattgaaggcgagctgatcgtttcagtggaaccgaagaacggtaaacctgatgtgagcattcaaagtgcacaatccgtaacagggcaggaagacgtccttaaatcgaaaggctttacgatcgttgataccttgcatgtagaggatagcagcgtcaagccactcgtctcgaagaatttcaataagaaagtggtggagaagatgggactggtgtatcttgttcaatactctccggaccagtttaaaagttccaacattgcgaagaaagaactcagaaaagaattgatggatctgggctttaaagtccgctatataagcgaaaattacaagatgatggcgatcgaaggtacagccactcttcaggcagtacaccctaaccaaaactggcattataatatgattaaagctccggaagcgtgggctattacgtctggatcctctagcgttaaagtagcagtcctggatacagggatcgaccataatcacccatccttggccaacttcgtgaatactaatcttggccggtcgtttgttggaggaaacaccatggatgttcaaggtcatggcacacatgttgctggcacgattgcatcttatgggagtgtaagcggagtgatgcagagtgcgacactgatcccggtcaaagtgctcgataattctggcagcgggtccctttacggtattacgcaaggcatattgtatgccgccgacatcgatgcggacgtcattaacatgtctctgggtggaggaggctataatcagagcatggatgaggctgttcaaacagcagttgctcagggaaccattgtagtagcagcgactggcaatgatggtgcatcgtcgatcagttatcctgctgcctacagcagcgtcattgcggtgggatctgtgacgtccaatcgtacacgatcctcgttttctaactatggatctgggcttgaagttatggcaccgggcagcaacatctacagtacgtatcctaattccagatatacatctttgagtggtacaagcatggctactccgcacgttgcgggcgtagctgggctcattcgcgcagccaacccagacatatctgtcgcgattgcccgtcagattctgcgggataccgcgcaagaagcaggatcgttcacacagtacggctatggaatcgtcgatgctcatgccgccgttgttgctgcatccggtggtagcggcggc

SEQ ID NO: 168 - protein, 413 aa, synthetic construct
  REGION 1..413: note = Variant of serine peptidase from Bacillus sinesaloumensis
MADQASQANGNQDVIEGELIVSVEPKNGKPDVSIQSAQSVTGQEDVLKSKGFTIVDTLHVEDSSVKPLVSKNFNKKVVEKMGLVYLVQYSPDQFKSSNIAKKELRKELMDLGFKVRYISENYKMMAIEGTATLQAVHPNQNWHYNMIKAPEAWAITSGSSSVKVAVLDTGIDHNHPSLANFVNTNLGRSFVGGNTMDVQGHGTHVAGTIASYGSVSGVMQSATLIPVKVLDNSGSGSLYGITQGILYAADIDADVINMSLGGGGYNQSMDEAVQTAVAQGTIVVAATGNDGASSISYPAAYSSVIAVGSVTSNRTRSSFSNYGSGLEVMAPGSNIYSTYPNSRYTSLSGTSMATPHVAGVAGLIRAANPDISVAIARQILRDTAQEAGSFTQYGYGIVDAHAAVVAASGGSGG

SEQ ID NO: 169 - DNA, 1239 bp, synthetic construct
  misc_feature 1..1239: note = Variant of serine peptidase from Bacillus sinesaloumensis
  source 1..1239: mol_type = other DNA
atggcagatcaagctagtcaagctaatggaaaccaggacgtcattgaaggcgagctgatcgtttcagtggaaccgaagaacggtaaacctgatgtgagcattcaaagtgcacaatccgtaacagggcaggaagacgtccttaaatcgaaaggctttacgatcgttgataccttgcatgtagaggatagcagcgtcaagccactcgtctcgaagaatttcaataagaaagtggtggagaagatgggactggtgtatcttgttcaatactctccggaccagtttaaaagttccaacattgcgaagaaagaactcagaaaagaattgatggatctgggctttaaagtccgctatataagcgaaaattacaagatgatggcgatcgaaggtacagccactcttcaggcagtacaccctaaccaaaactggcattataatatgattaaagctccggaagcgtgggctattacgtctggatcctctagcgttaaagtagcagtcctggatacagggatcgaccataatcacccatccttggccatgttcgtgaatactaatcttggccggtcgtttgttggaggaaacaccatggatgttcaaggtcatggcacacatgttgctggcacgattgcatcttatgggagtgtaagcggagtgatgcagagtgcgacactgatcccggtcaaagtgctcgataattctggcagcgggtccctttacggtattacgcaaggcatattgtatgccgccgacatcgatgcggacgtcattaacatgtctctgggtggaggaggctataatcagagcatggatgaggctgttcaaacagcagttgctcagggaaccattgtagtagcagcgactggcaatgatggtgcatcgtcgatcagttatcctgctgcctacagcagcgtcattgcggtgggatctgtgacgtccaatcgtacacgatcctcgttttctaactatggatctgggcttgaagttatggcaccgggcagcaacatctacagtacgtatcctaattccagatatacatctttgagtggtacaagcatggctactccgcacgttgcgggcgtagctgggctcattcgcgcagccaacccagacatatctgtcgcgcaagcccgtcagattctgcgggataccgcgcaagaagcaggatcgttcacacagtacggctatggaatcgtcgatgctcatgccgccgttgttgctgcatccggtggtagcggcggc

SEQ ID NO: 170 - protein, 413 aa, synthetic construct
  REGION 1..413: note = Variant of serine peptidase from Bacillus sinesaloumensis
MADQASQANGNQDVIEGELIVSVEPKNGKPDVSIQSAQSVTGQEDVLKSKGFTIVDTLHVEDSSVKPLVSKNFNKKVVEKMGLVYLVQYSPDQFKSSNIAKKELRKELMDLGFKVRYISENYKMMAIEGTATLQAVHPNQNWHYNMIKAPEAWAITSGSSSVKVAVLDTGIDHNHPSLAMFVNTNLGRSFVGGNTMDVQGHGTHVAGTIASYGSVSGVMQSATLIPVKVLDNSGSGSLYGITQGILYAADIDADVINMSLGGGGYNQSMDEAVQTAVAQGTIVVAATGNDGASSISYPAAYSSVIAVGSVTSNRTRSSFSNYGSGLEVMAPGSNIYSTYPNSRYTSLSGTSMATPHVAGVAGLIRAANPDISVAQARQILRDTAQEAGSFTQYGYGIVDAHAAVVAASGGSGG

SEQ ID NO: 171 - DNA, 1239 bp, synthetic construct
  misc_feature 1..1239: note = Variant of serine peptidase from Bacillus sinesaloumensis
  source 1..1239: mol_type = other DNA
atggcagatcaagctagtcaagctaatggaaaccaggacgtcattgaaggcgagctgatcgtttcagtggaaccgaagaacggtaaacctgatgtgagcattcaaagtgcacaatccgtaacagggcaggaagacgtccttaaatcgaaaggctttacgatcgttgataccttgcatgtagaggatagcagcgtcaagccactcgtctcgaagaatttcaataagaaagtggtggagaagatgggactggtgtatcttgttcaatactctccggaccagtttaaaagttccaacattgcgaagaaagaactcagaaaagaattgatggatctgggctttaaagtccgctatataagcgaaaattacaagatgatggcgatcgaaggtacagccactcttcaggcagtacaccctaaccaaaactggcattataatatgattaaagctccggaagcgtgggctattacgtctggatcctctagcgttaaagtagcagtcctggatacagggatcgaccataatcacccatccttggccaacttcgtgaatactaatcttggccggtcgtttgttggaggaaacaccatggatgttcaaggtcatggcacacatgttgctggcacgattgcatcttatgggagtgtaagcggagtgatgcagagtgcgacactgatcccggtcaaagtgctcgataattctggcagcgggtccctttacggtattacgcaaggcatattgtatgccgccgacatcgatgcggacgtcattaacatgtctctgggtggaggaggctataatcagagcatggatgaggctgttcaaacagcagttgctcagggaaccattgtagtagcagcgactggcaatgatggtgcatcgtcgatcagttatcctgctgcctacagcagcgtcattgcggtgggatctgtgacgtccaatcgtacacgatcctcgttttctaactatggatctgggcttgaagttatggcaccgggcagcaacatctacagtacgtatcctaattccagatatacatctttgagtggtacaagcatggctactccgcacgttgcgggcgtagctgggctcattcgcgcagccaacgttgacatatctgtcgcgcaagcccgtcagattctgcgggataccgcgcaagaagcaggatcgttcacacagtacggctatggaatcgtcgatgctcatgccgccgttgttgctgcatccggtggtagcggcggc

SEQ ID NO: 172 - protein, 413 aa, synthetic construct
  REGION 1..413: note = Variant of serine peptidase from Bacillus sinesaloumensis
MADQASQANGNQDVIEGELIVSVEPKNGKPDVSIQSAQSVTGQEDVLKSKGFTIVDTLHVEDSSVKPLVSKNFNKKVVEKMGLVYLVQYSPDQFKSSNIAKKELRKELMDLGFKVRYISENYKMMAIEGTATLQAVHPNQNWHYNMIKAPEAWAITSGSSSVKVAVLDTGIDHNHPSLANFVNTNLGRSFVGGNTMDVQGHGTHVAGTIASYGSVSGVMQSATLIPVKVLDNSGSGSLYGITQGILYAADIDADVINMSLGGGGYNQSMDEAVQTAVAQGTIVVAATGNDGASSISYPAAYSSVIAVGSVTSNRTRSSFSNYGSGLEVMAPGSNIYSTYPNSRYTSLSGTSMATPHVAGVAGLIRAANVDISVAQARQILRDTAQEAGSFTQYGYGIVDAHAAVVAASGGSGG

SEQ ID NO: 173 - DNA, 1239 bp, synthetic construct
  misc_feature 1..1239: note = Variant of serine peptidase from Bacillus sinesaloumensis
  source 1..1239: mol_type = other DNA
atggcagatcaagctagtcaagctaatggaaaccaggacgtcattgaaggcgagctgatcgtttcagtggaaccgaagaacggtaaacctgatgtgagcattcaaagtgcacaatccgtaacagggcaggaagacgtccttaaatcgaaaggctttacgatcgttgataccttgcatgtagaggatagcagcgtcaagccactcgtctcgaagaatttcaataagaaagtggtggagaagatgggactggtgtatcttgttcaatactctccggaccagtttaaaagttccaacattgcgaagaaagaactcagaaaagaattgatggatctgggctttaaagtccgctatataagcgaaaattacaagatgatggcgatcgaaggtacagccactcttcaggcagtacaccctaaccaaaactggcattataatatgattaaagctccggaagcgtgggctattacgtctggatcctctagcgttaaagtagcagtcctggatacagggatcgaccataatcacccatccttggccaacttcgtgaatactaatcttggccggtcgtttgttggaggaaacaccatggatgttcaaggtcatggcacacatgttgctggcacgattgcatcttatgggagtgtaagcggagtgatgcagagtgcgacactgatcccggtcaaagtgctcgataattctggcagcgggtccctttacggtattacgcaaggcatattgtatgccgccgacgatgatgcggacgtcattaacatgtctctgggtggaggaggctataatcagagcatggatgaggctgttcaaacagcagttgctcagggaaccattgtagtagcagcgactggcaatgatggtgcatcgtcgatcagttatcctgctgcctacagcagcgtcattgcggtgggatctgtgacgtccaatcgtacacgatcctcgttttctaactatggatctgggcttgaagttatggcaccgggcagcaacatctacagtacgtatcctaattccagatatacatctttgagtggtacaagcatggctactccgcacgttgcgggcgtagctgggctcattcgcgcagccaacccagacatatctgtcgcgcaagcccgtcagattctgcgggataccgcgcaagaagcaggatcgttcacacagtacggctatggaatcgtcgatgctcatgccgccgttgttgctgcatccggtggtagcggcggc

SEQ ID NO: 174 - protein, 413 aa, synthetic construct
  REGION 1..413: note = Variant of serine peptidase from Bacillus sinesaloumensis
MADQASQANGNQDVIEGELIVSVEPKNGKPDVSIQSAQSVTGQEDVLKSKGFTIVDTLHVEDSSVKPLVSKNFNKKVVEKMGLVYLVQYSPDQFKSSNIAKKELRKELMDLGFKVRYISENYKMMAIEGTATLQAVHPNQNWHYNMIKAPEAWAITSGSSSVKVAVLDTGIDHNHPSLANFVNTNLGRSFVGGNTMDVQGHGTHVAGTIASYGSVSGVMQSATLIPVKVLDNSGSGSLYGITQGILYAADDDADVINMSLGGGGYNQSMDEAVQTAVAQGTIVVAATGNDGASSISYPAAYSSVIAVGSVTSNRTRSSFSNYGSGLEVMAPGSNIYSTYPNSRYTSLSGTSMATPHVAGVAGLIRAANPDISVAQARQILRDTAQEAGSFTQYGYGIVDAHAAVVAASGGSGG

SEQ ID NO: 175 - DNA, 1239 bp, synthetic construct
  misc_feature 1..1239: note = Variant of serine peptidase from Bacillus sinesaloumensis
  source 1..1239: mol_type = other DNA
atggcagatcaagctagtcaagctaatggaaaccaggacgtcattgaaggcgagctgatcgtttcagtggaaccgaagaacggtaaacctgatgtgagcattcaaagtgcacaatccgtaacagggcaggaagacgtccttaaatcgaaaggctttacgatcgttgataccttgcatgtagaggatagcagcgtcaagccactcgtctcgaagaatttcaataagaaagtggtggagaagatgggactggtgtatcttgttcaatactctccggaccagtttaaaagttccaacattgcgaagaaagaactcagaaaagaattgatggatctgggctttaaagtccgctatataagcgaaaattacaagatgatggcgatcgaaggtacagccactcttcaggcagtacaccctaaccaaaactggcattataatatgattaaagctccggaagcgtgggctattacgtctggatcctctagcgttaaagtagcagtcctggatacagggatcgaccataatcacccatccttggccaacttcgtgaatactaatcttggccggtcgtttgttggaggaaacaccatggatgttcaaggtcatggcacacatgttgctggcacgattgcatcttatgggagtgtaagcggagtgatgcagagtgcgacactgatcccggtcaaagtgctcgataattctggcagcgggtccctttacggtattacgcaaggcatattgtatgccgccgacatcgatgcggacgtcattaacatgtctctgggtggaggagcgtataatcagagcatggatgaggctgttcaaacagcagttgctcagggaaccattgtagtagcagcgactggcaatgatggtgcatcgtcgatcagttatcctgctgcctacagcagcgtcattgcggtgggatctgtgacgtccaatcgtacacgatcctcgttttctaactatggatctgggcttgaagttatggcaccgggcagcaacatctacagtacgtatcctaattccagatatacatctttgagtggtacaagcatggctactccgcacgttgcgggcgtagctgggctcattcgcgcagccaacccagacatatctgtcgcgcaagcccgtcagattctgcgggataccgcgcaagaagcaggatcgttcacacagtacggctatggaatcgtcgatgctcatgccgccgttgttgctgcatccggtggtagcggcggc

SEQ ID NO: 176 - protein, 413 aa, synthetic construct
  REGION 1..413: note = Variant of serine peptidase from Bacillus sinesaloumensis
MADQASQANGNQDVIEGELIVSVEPKNGKPDVSIQSAQSVTGQEDVLKSKGFTIVDTLHVEDSSVKPLVSKNFNKKVVEKMGLVYLVQYSPDQFKSSNIAKKELRKELMDLGFKVRYISENYKMMAIEGTATLQAVHPNQNWHYNMIKAPEAWAITSGSSSVKVAVLDTGIDHNHPSLANFVNTNLGRSFVGGNTMDVQGHGTHVAGTIASYGSVSGVMQSATLIPVKVLDNSGSGSLYGITQGILYAADIDADVINMSLGGGAYNQSMDEAVQTAVAQGTIVVAATGNDGASSISYPAAYSSVIAVGSVTSNRTRSSFSNYGSGLEVMAPGSNIYSTYPNSRYTSLSGTSMATPHVAGVAGLIRAANPDISVAQARQILRDTAQEAGSFTQYGYGIVDAHAAVVAASGGSGG

SEQ ID NO: 177 - DNA, 1239 bp, synthetic construct
  misc_feature 1..1239: note = Variant of serine peptidase from Bacillus sinesaloumensis
  source 1..1239: mol_type = other DNA
atggcagatcaagctagtcaagctaatggaaaccaggacgtcattgaaggcgagctgatcgtttcagtggaaccgaagaacggtaaacctgatgtgagcattcaaagtgcacaatccgtaacagggcaggaagacgtccttaaatcgaaaggctttacgatcgttgataccttgcatgtagaggatagcagcgtcaagccactcgtctcgaagaatttcaataagaaagtggtggagaagatgggactggtgtatcttgttcaatactctccggaccagtttaaaagttccaacattgcgaagaaagaactcagaaaagaattgatggatctgggctttaaagtccgctatataagcgaaaattacaagatgatggcgatcgaaggtacagccactcttcaggcagtacaccctaaccaaaactggcattataatatgattaaagctccggaagcgtgggctattacgtctggatcctctagcgttttggtagcagtcctggatacagggatcgaccataatcacccatccttggccaacttcgtgaatactaatcttggccggtcgtttgttggaggaaacaccatggatgttcaaggtcatggcacacatgttgctggcacgattgcatcttatgggagtgtaagcggagtgatgcagagtgcgacactgatcccggtcaaagtgctcgataattctggcagcgggtccctttacggtattacgcaaggcatattgtatgccgccgacatcgatgcggacgtcattaacatgtctctgggtggaggaggctataatcagagcatggatgaggctgttcaaacagcagttgctcagggaaccattgtagtagcagcgactggcaatgatggtgcatcgtcgatcagttatcctgctgcctacagcagcgtcattgcggtgggatctgtgacgtccaatcgtacacgatcctcgttttctaactatggatctgggcttgaagttatggcaccgggcagcaacatctacagtacgtatcctaattccagatatacatctttgagtggtacaagcatggctactccgcacgttgcgggcgtagctgggctcattcgcgcagccaacccagacatatctgtcgcgcaagcccgtcagattctgcgggataccgcgcaagaagcaggatcgttcacacagtacggctatggaatcgtcgatgctcatgccgccgttgttgctgcatccggtggtagcggcggc

SEQ ID NO: 178 - protein, 413 aa, synthetic construct
  REGION 1..413: note = Variant of serine peptidase from Bacillus sinesaloumensis
MADQASQANGNQDVIEGELIVSVEPKNGKPDVSIQSAQSVTGQEDVLKSKGFTIVDTLHVEDSSVKPLVSKNFNKKVVEKMGLVYLVQYSPDQFKSSNIAKKELRKELMDLGFKVRYISENYKMMAIEGTATLQAVHPNQNWHYNMIKAPEAWAITSGSSSVLVAVLDTGIDHNHPSLANFVNTNLGRSFVGGNTMDVQGHGTHVAGTIASYGSVSGVMQSATLIPVKVLDNSGSGSLYGITQGILYAADIDADVINMSLGGGGYNQSMDEAVQTAVAQGTIVVAATGNDGASSISYPAAYSSVIAVGSVTSNRTRSSFSNYGSGLEVMAPGSNIYSTYPNSRYTSLSGTSMATPHVAGVAGLIRAANPDISVAQARQILRDTAQEAGSFTQYGYGIVDAHAAVVAASGGSGG

SEQ ID NO: 179 - DNA, 1239 bp, synthetic construct
  misc_feature 1..1239: note = Variant of serine peptidase from Bacillus sinesaloumensis
  source 1..1239: mol_type = other DNA
atggcagatcaagctagtcaagctaatggaaaccaggacgtcattgaaggcgagctgatcgtttcagtggaaccgaagaacggtaaacctgatgtgagcattcaaagtgcacaatccgtaacagggcaggaagacgtccttaaatcgaaaggctttacgatcgttgataccttgcatgtagaggatagcagcgtcaagccactcgtctcgaagaatttcaataagaaagtggtggagaagatgggactggtgtatcttgttcaatactctccggaccagtttaaaagttccaacattgcgaagaaagaactcagaaaagaattgatggatctgggctttaaagtccgctatataagcgaaaattacaagatgatggcgatcgaaggtacagccactcttcaggcagtacaccctaaccaaaactggcattataatatgattaaagctccggaagcgtgggctattacgtctggatcctctagcgttaaagtagcagtcctggatacagggatcgaccataatcacccatccttggccaacttcgtgaatactaatcttggccggtcgtttgttggaggaaacaccatggatgttcaaggtcatggcacacatgttgctggcacgattgcatcttatgggagtgtaagcggagtgatgcagagtgcgacactgatcccggtcaaagtgctccataattctggcagcgggtccctttacggtattacgcaaggcatattgtatgccgccgacatcgatgcggacgtcattaacatgtctctgggtggaggaggctataatcagagcatggatgaggctgttcaaacagcagttgctcagggaaccattgtagtagcagcgactggcaatgatggtgcatcgtcgatcagttatcctgctgcctacagcagcgtcattgcggtgggatctgtgacgtccaatcgtacacgatcctcgttttctaactatggatctgggcttgaagttatggcaccgggcagcaacatctacagtacgtatcctaattccagatatacatctttgagtggtacaagcatggctactccgcacgttgcgggcgtagctgggctcattcgcgcagccaacccagacatatctgtcgcgcaagcccgtcagattctgcgggataccgcgcaagaagcaggatcgttcacacagtacggctatggaatcgtcgatgctcatgccgccgttgttgctgcatccggtggtagcggcggc

SEQ ID NO: 180 - protein, 413 aa, synthetic construct
  REGION 1..413: note = Variant of serine peptidase from Bacillus sinesaloumensis
MADQASQANGNQDVIEGELIVSVEPKNGKPDVSIQSAQSVTGQEDVLKSKGFTIVDTLHVEDSSVKPLVSKNFNKKVVEKMGLVYLVQYSPDQFKSSNIAKKELRKELMDLGFKVRYISENYKMMAIEGTATLQAVHPNQNWHYNMIKAPEAWAITSGSSSVKVAVLDTGIDHNHPSLANFVNTNLGRSFVGGNTMDVQGHGTHVAGTIASYGSVSGVMQSATLIPVKVLHNSGSGSLYGITQGILYAADIDADVINMSLGGGGYNQSMDEAVQTAVAQGTIVVAATGNDGASSISYPAAYSSVIAVGSVTSNRTRSSFSNYGSGLEVMAPGSNIYSTYPNSRYTSLSGTSMATPHVAGVAGLIRAANPDISVAQARQILRDTAQEAGSFTQYGYGIVDAHAAVVAASGGSGG

SEQ ID NO: 181 - DNA, 1239 bp, synthetic construct
  misc_feature 1..1239: note = Variant of serine peptidase from Bacillus sinesaloumensis
  source 1..1239: mol_type = other DNA
atggcagatcaagctagtcaagctaatggaaaccaggacgtcattgaaggcgagctgatcgtttcagtggaaccgaagaacggtaaacctgatgtgagcattcaaagtgcacaatccgtaacagggcaggaagacgtccttaaatcgaaaggctttacgatcgttgataccttgcatgtagaggatagcagcgtcaagccactcgtctcgaagaatttcaataagaaagtggtggagaagatgggactggtgtatcttgttcaatactctccggaccagtttaaaagttccaacattgcgaagaaagaactcagaaaagaattgatggatctgggctttaaagtccgctatataagcgaaaattacaagatgatggcgatcgaaggtacagccactcttcaggcagtacaccctaaccaaaactggcattataatatgattaaagctccggaagcgtgggctattacgtctggatcctctagcgttaaagtagcagtcctggatacagggatcgaccataatcacccatccttggccaacttcgtgaatactaatcttggccggtcgtttgttggaggaaacaccatggatgttcaaggtcatggcacacatgttgctggcacgattgcatcttatgggagtgtaagcggagtgatgcagagtgcgacactgatcccggtcaaagtgctcgataattctggcagcgggtccctttacggtattacgcaaggcatattgtatgccgccgacatcgatgcggacgtcattaacatgtctctgggtggaggaggctataatcagagcatggatgaggctgttcaaacagcagttgctcagggaaccattgtagtagcagcgactggcaatgatggtgcatcgtcgatcagttatcctgctgcctacagcagcgtcattgcggtgggatctgtgacgtccaatcgtacacgatcctcgttttctaactatggatctgggcttgaagttatggcaccgggcagcaacatctacagtacgtatcctaattcctcttatacatctttgagtggtacaagcatggctactccgcacgttgcgggcgtagctgggctcattcgcgcagccaacccagacatatctgtcgcgcaagcccgtcagattctgcgggataccgcgcaagaagcaggatcgttcacacagtacggctatggaatcgtcgatgctcatgccgccgttgttgctgcatccggtggtagcggcggc

SEQ ID NO: 182 - protein, 413 aa, synthetic construct
  REGION 1..413: note = Variant of serine peptidase from Bacillus sinesaloumensis
MADQASQANGNQDVIEGELIVSVEPKNGKPDVSIQSAQSVTGQEDVLKSKGFTIVDTLHVEDSSVKPLVSKNFNKKVVEKMGLVYLVQYSPDQFKSSNIAKKELRKELMDLGFKVRYISENYKMMAIEGTATLQAVHPNQNWHYNMIKAPEAWAITSGSSSVKVAVLDTGIDHNHPSLANFVNTNLGRSFVGGNTMDVQGHGTHVAGTIASYGSVSGVMQSATLIPVKVLDNSGSGSLYGITQGILYAADIDADVINMSLGGGGYNQSMDEAVQTAVAQGTIVVAATGNDGASSISYPAAYSSVIAVGSVTSNRTRSSFSNYGSGLEVMAPGSNIYSTYPNSSYTSLSGTSMATPHVAGVAGLIRAANPDISVAQARQILRDTAQEAGSFTQYGYGIVDAHAAVVAASGGSGG

SEQ ID NO: 183 - DNA, 1239 bp, synthetic construct
  misc_feature 1..1239: note = Variant of serine peptidase from Bacillus sinesaloumensis
  source 1..1239: mol_type = other DNA
atggcagatcaagctagtcaagctaatggaaaccaggacgtcattgaaggcgagctgatcgtttcagtggaaccgaagaacggtaaacctgatgtgagcattcaaagtgcacaatccgtaacagggcaggaagacgtccttaaatcgaaaggctttacgatcgttgataccttgcatgtagaggatagcagcgtcaagccactcgtctcgaagaatttcaataagaaagtggtggagaagatgggactggtgtatcttgttcaatactctccggaccagtttaaaagttccaacattgcgaagaaagaactcagaaaagaattgatggatctgggctttaaagtccgctatataagcgaaaattacaagatgatggcgatcgaaggtacagccactcttcaggcagtacaccctaaccaaaactggcattataatatgattaaagctccggaagcgtgggctattacgtctggatcctctagcgttaaagtagcagtcctggatacagggatcgaccataatcacccatccttggccaacttcgtgaatactaatcttggccggtcgtttgttggaggaaacaccatggatgttcaaggtcatggcacacatgttgctggcacgattgcatcttatgggagtgtaagcggagtgatgcagagtgcgacactgatcccggtcaaagtgctcgataattctggcagcgggtccctttacggtattacgcaaggcatattgtatgccgccgacatcgatgcggacgtcattaacatgtctctgggtggaggacgttataatcagagcatggatgaggctgttcaaacagcagttgctcggggaaccattgtagtagcagcgactggcaatgatggtgcatcgtcgatcagttatcctgctgcctacagcagcgtcattgcggtgggatctgtgacgtccaatcgtacacgatcctcgttttctaactatggatctgggcttgaagttatggcaccgggcagcaacatctacagtacgtatcctaattccagatatacatctttgagtggtacaagcatggctactccgcacgttgcgggcgtagctgggctcattcgcgcagccaacccagacatatctgtcgcgcaagcccgtcagattctgcgggataccgcgcaagaagcaggatcgttcacacagtacggctatggaatcgtcgatgctcatgccgccgttgttgctgcatccggtggtagcggcggc

SEQ ID NO: 184 - protein, 413 aa, synthetic construct
  REGION 1..413: note = Variant of serine peptidase from Bacillus sinesaloumensis
MADQASQANGNQDVIEGELIVSVEPKNGKPDVSIQSAQSVTGQEDVLKSKGFTIVDTLHVEDSSVKPLVSKNFNKKVVEKMGLVYLVQYSPDQFKSSNIAKKELRKELMDLGFKVRYISENYKMMAIEGTATLQAVHPNQNWHYNMIKAPEAWAITSGSSSVKVAVLDTGIDHNHPSLANFVNTNLGRSFVGGNTMDVQGHGTHVAGTIASYGSVSGVMQSATLIPVKVLDNSGSGSLYGITQGILYAADIDADVINMSLGGGRYNQSMDEAVQTAVARGTIVVAATGNDGASSISYPAAYSSVIAVGSVTSNRTRSSFSNYGSGLEVMAPGSNIYSTYPNSRYTSLSGTSMATPHVAGVAGLIRAANPDISVAQARQILRDTAQEAGSFTQYGYGIVDAHAAVVAASGGSGG

SEQ ID NO: 185 - DNA, 1239 bp, synthetic construct
  misc_feature 1..1239: note = Variant of serine peptidase from Bacillus sinesaloumensis
  source 1..1239: mol_type = other DNA
atggcagatcaagctagtcaagctaatggaaaccaggacgtcattgaaggcgagctgatcgtttcagtggaaccgaagaacggtaaacctgatgtgagcattcaaagtgcacaatccgtaacagggcaggaagacgtccttaaatcgaaaggctttacgatcgttgataccttgcatgtagaggatagcagcgtcaagccactcgtctcgaagaatttcaataagaaagtggtggagaagatgggactggtgtatcttgttcaatactctccggaccagtttaaaagttccaacattgcgaagaaagaactcagaaaagaattgatggatctgggctttaaagtccgctatataagcgaaaattacaagatgatggcgatcgaaggtacagccactcttcaggcagtacaccctaaccaaaactggcattataatatgattaaagctccggaagcgtgggctattacgtctggatcctctagcgttaaagtagcagtcctggatacagggatcgaccataatcacccatccttggccaacttcgtgaatactaatcttggccggtcgtttgttggaggaaacaccatggatgttcaaggtcatggcacacatgttgctggcacgattgcatcttatgggagtgtaagcggagtgatgcagagtgcgacactgatcccggtcaaagtgctcgataattctggcagcgggtccctttacggtattacgcaaggcatattgtatgccgccgacatcgatgcggacgtcattaacatgtctctgggtggaggaggctataatcagagcatggatgaggctgttgctacagcagttgctcagggaaccattgtagtagcagcgactggcaatgatggtgcatcgtcgatcagttatcctgctgcctacagcagcgtcattgcggtgggatctgtgacgtccaatcgtacacgatcctcgttttctaactatggatctgggcttgaagttatggcaccgggcagcaacatctacagtacgtatcctaattccagatatacatctttgagtggtacaagcatggctactccgcacgttgcgggcgtagctgggctcattcgcgcagccaacccagacatatctgtcgcgcaagcccgtcagattctgcgggataccgcgcaagaagcaggatcgttcacacagtacggctatggaatcgtcgatgctcatgccgccgttgttgctgcatccggtggtagcggcggc

SEQ ID NO: 186 - protein, 413 aa, synthetic construct
  REGION 1..413: note = Variant of serine peptidase from Bacillus sinesaloumensis
MADQASQANGNQDVIEGELIVSVEPKNGKPDVSIQSAQSVTGQEDVLKSKGFTIVDTLHVEDSSVKPLVSKNFNKKVVEKMGLVYLVQYSPDQFKSSNIAKKELRKELMDLGFKVRYISENYKMMAIEGTATLQAVHPNQNWHYNMIKAPEAWAITSGSSSVKVAVLDTGIDHNHPSLANFVNTNLGRSFVGGNTMDVQGHGTHVAGTIASYGSVSGVMQSATLIPVKVLDNSGSGSLYGITQGILYAADIDADVINMSLGGGGYNQSMDEAVATAVAQGTIVVAATGNDGASSISYPAAYSSVIAVGSVTSNRTRSSFSNYGSGLEVMAPGSNIYSTYPNSRYTSLSGTSMATPHVAGVAGLIRAANPDISVAQARQILRDTAQEAGSFTQYGYGIVDAHAAVVAASGGSGG

SEQ ID NO: 187 - DNA, 1239 bp, synthetic construct
  misc_feature 1..1239: note = Variant of serine peptidase from Bacillus sinesaloumensis
  source 1..1239: mol_type = other DNA
atggcagatcaagctagtcaagctaatggaaaccaggacgtcattgaaggcgagctgatcgtttcagtggaaccgaagaacggtaaacctgatgtgagcattcaaagtgcacaatccgtaacagggcaggaagacgtccttaaatcgaaaggctttacgatcgttgataccttgcatgtagaggatagcagcgtcaagccactcgtctcgaagaatttcaataagaaagtggtggagaagatgggactggtgtatcttgttcaatactctccggaccagtttaaaagttccaacattgcgaagaaagaactcagaaaagaattgatggatctgggctttaaagtccgctatataagcgaaaattacaagatgatggcgatcgaaggtacagccactcttcaggcagtacaccctaaccaaaactggcattataatatgattaaagctccggaagcgtgggctattacgtctggatcctctagcgttaaagtagcagtcctggatacagggatcgaccataatcacccatccttggccaacttcgtgaatactaatcttggccggtcgtttgttggaggaaacaccatggatgttcaaggtcatggcacacatgttgctggcacgattgcatcttatgggagtgtaagcggagtgatgcagagtgcgacactgatcccggtcaaagtgctcgataattctggcagcgggtccctttacggtattacgcaaggcatattgtatgccgccgacatcgatgcggacgtcattaacatgtctctgggtggaggaggctataatcagagcatggatgaggctgttcaaacagcagttgcttatggaaccattgtagtagcagcgactggcaatgatggtgcatcgtcgatcagttatcctgctgcctacagcagcgtcattgcggtgggatctgtgacgtccaatcgtacacgatcctcgttttctaactatggatctgggcttgaagttatggcaccgggcagcaacatctacagtacgtatcctaattccagatatacatctttgagtggtacaagcatggctactccgcacgttgcgggcgtagctgggctcattcgcgcagccaacccagacatatctgtcgcgcaagcccgtcagattctgcgggataccgcgcaagaagcaggatcgttcacacagtacggctatggaatcgtcgatgctcatgccgccgttgttgctgcatccggtggtagcggcggc

SEQ ID NO: 188 - protein, 413 aa, synthetic construct
  REGION 1..413: note = Variant of serine peptidase from Bacillus sinesaloumensis
MADQASQANGNQDVIEGELIVSVEPKNGKPDVSIQSAQSVTGQEDVLKSKGFTIVDTLHVEDSSVKPLVSKNFNKKVVEKMGLVYLVQYSPDQFKSSNIAKKELRKELMDLGFKVRYISENYKMMAIEGTATLQAVHPNQNWHYNMIKAPEAWAITSGSSSVKVAVLDTGIDHNHPSLANFVNTNLGRSFVGGNTMDVQGHGTHVAGTIASYGSVSGVMQSATLIPVKVLDNSGSGSLYGITQGILYAADIDADVINMSLGGGGYNQSMDEAVQTAVAYGTIVVAATGNDGASSISYPAAYSSVIAVGSVTSNRTRSSFSNYGSGLEVMAPGSNIYSTYPNSRYTSLSGTSMATPHVAGVAGLIRAANPDISVAQARQILRDTAQEAGSFTQYGYGIVDAHAAVVAASGGSGG

SEQ ID NO: 189 - DNA, 1239 bp, synthetic construct
  misc_feature 1..1239: note = Variant of serine peptidase from Bacillus sinesaloumensis
  source 1..1239: mol_type = other DNA
atggcagatcaagctagtcaagctaatggaaaccaggacgtcattgaaggcgagctgatcgtttcagtggaaccgaagaacggtaaacctgatgtgagcattcaaagtgcacaatccgtaacagggcaggaagacgtccttaaatcgaaaggctttacgatcgttgataccttgcatgtagaggatagcagcgtcaagccactcgtctcgaagaatttcaataagaaagtggtggagaagatgggactggtgtatcttgttcaatactctccggaccagtttaaaagttccaacattgcgaagaaagaactcagaaaagaattgatggatctgggctttaaagtccgctatataagcgaaaattacaagatgatggcgatcgaaggtacacctactcttcaggcagtacaccctaaccaaaactggcattataatatgattaaagctccggaagcgtgggctattacgtctggatcctctagcgttaaagtagcagtcctggatacagggatcgaccataatcacccatccttggccaacttcgtgaatactaatcttggccggtcgtttgttggaggaaacaccatggatgttcaaggtcatggcacacatgttgctggcacgattgcatcttatgggagtgtaagcggagtgatgcagagtgcgacactgatcccggtcaaagtgctcgataattctggcagcgggtccctttacggtattacgcaaggcatattgtatgccgccgacatcgatgcggacgtcattaacatgtctctgggtggaggaggctataatcagagcatggatgaggctgttcaaacagcagttgctcagggaaccattgtagtagcagcgactggcaatgatggtgcatcgtcgatcagttatcctgctgcctacagcagcgtcattgcggtgggatctgtgacgtccaatcgtacacgatcctcgttttctaactatggatctgggcttgaagttatggcaccgggcagcaacatctacagtacgtatcctaattccagatatacatctttgagtggtacaagcatggctactccgcacgttgcgggcgtagctgggctcattcgcgcagccaacccagacatatctgtcgcgcaagcccgtcagattctgcgggataccgcgcaagaagcaggatcgttcacacagtacggctatggaatcgtcgatgctcatgccgccgttgttgctgcatccggtggtagcggcggc

SEQ ID NO: 190 - protein, 413 aa, synthetic construct
  REGION 1..413: note = Variant of serine peptidase from Bacillus sinesaloumensis
MADQASQANGNQDVIEGELIVSVEPKNGKPDVSIQSAQSVTGQEDVLKSKGFTIVDTLHVEDSSVKPLVSKNFNKKVVEKMGLVYLVQYSPDQFKSSNIAKKELRKELMDLGFKVRYISENYKMMAIEGTPTLQAVHPNQNWHYNMIKAPEAWAITSGSSSVKVAVLDTGIDHNHPSLANFVNTNLGRSFVGGNTMDVQGHGTHVAGTIASYGSVSGVMQSATLIPVKVLDNSGSGSLYGITQGILYAADIDADVINMSLGGGGYNQSMDEAVQTAVAQGTIVVAATGNDGASSISYPAAYSSVIAVGSVTSNRTRSSFSNYGSGLEVMAPGSNIYSTYPNSRYTSLSGTSMATPHVAGVAGLIRAANPDISVAQARQILRDTAQEAGSFTQYGYGIVDAHAAVVAASGGSGG

SEQ ID NO: 191 - DNA, 1239 bp, synthetic construct
  misc_feature 1..1239: note = Variant of serine peptidase from Bacillus sinesaloumensis
  source 1..1239: mol_type = other DNA
atggcagatcaagctagtcaagctaatggaaaccaggacgtcattgaaggcgagctgatcgtttcagtggaaccgaagaacggtaaacctgatgtgagcattcaaagtgcacaatccgtaacagggcaggaagacgtccttaaatcgaaaggctttacgatcgttgataccttgcatgtagaggatagcagcgtcaagccactcgtctcgaagaatttcaataagaaagtggtggagaagatgggactggtgtatcttgttcaatactctccggaccagtttaaaagttccaacattgcgaagaaagaactcagaaaagaattgatggatctgggctttaaagtccgctatataagcgaaaattacaagatgatggcgatcgaaggtacagccactcttcaggcagtacaccctaaccaaaactggcattataatatgattaaagctccggaagcgtgggctattacgtctggatcctctagcgttaaagtagcagtcctggatacagggatcgaccataatcacccatccttggccaacttcgtgaatactaatcttggccggtcgtttgttggaggaaacaccatggatgttcaaggtcatggcacacatgttgctggcacgattgcatcttatgggagtgtaagcggagtgatgcagagtgcgacactgatcccggtcaaagtgctcgatagttctggcagcgggtccctttacggtattacgcaaggcatattgtatgccgccgacatcgatgcggacgtcattaacatgtctctgggtggaggaggctataatcagagcatggatgaggctgttcaaacagcagttgctcagggaaccattgtagtagcagcgactggcaatgatggtgcatcgtcgatcagttatcctgctgcctacagcagcgtcattgcggtgggatctgtgacgtccaatcgtacacgatcctcgttttctaactatggatctgggcttgaagttatggcaccgggcagcaacatctacagtacgtatcctaattccagatatacatctttgagtggtacaagcatggctactccgcacgttgcgggcgtagctgggctcattcgcgcagccaacccagacatatctgtcgcgcaagcccgtcagattctgcgggataccgcgcaagaagcaggatcgttcacacagtacggctatggaatcgtcgatgctcatgccgccgttgttgctgcatccggtggtagcggcggc

SEQ ID NO: 192 - protein, 413 aa, synthetic construct
  REGION 1..413: note = Variant of serine peptidase from Bacillus sinesaloumensis
MADQASQANGNQDVIEGELIVSVEPKNGKPDVSIQSAQSVTGQEDVLKSKGFTIVDTLHVEDSSVKPLVSKNFNKKVVEKMGLVYLVQYSPDQFKSSNIAKKELRKELMDLGFKVRYISENYKMMAIEGTATLQAVHPNQNWHYNMIKAPEAWAITSGSSSVKVAVLDTGIDHNHPSLANFVNTNLGRSFVGGNTMDVQGHGTHVAGTIASYGSVSGVMQSATLIPVKVLDSSGSGSLYGITQGILYAADIDADVINMSLGGGGYNQSMDEAVQTAVAQGTIVVAATGNDGASSISYPAAYSSVIAVGSVTSNRTRSSFSNYGSGLEVMAPGSNIYSTYPNSRYTSLSGTSMATPHVAGVAGLIRAANPDISVAQARQILRDTAQEAGSFTQYGYGIVDAHAAVVAASGGSGG

SEQ ID NO: 193 - DNA, 1239 bp, synthetic construct
  misc_feature 1..1239: note = Variant of serine peptidase from Bacillus sinesaloumensis
  source 1..1239: mol_type = other DNA
atggcagatcaagctagtcaagctaatggaaaccaggacgtcattgaaggcgagctgatcgtttcagtggaaccgaagaacggtaaacctgatgtgagcattcaaagtgcacaatccgtaacagggcaggaagacgtccttaaatcgaaaggctttacgatcgttgataccttgcatgtagaggatagcagcgtcaagccactcgtctcgaagaatttcaataagaaagtggtggagaagatgggactggtgtatcttgttcaatactctccggaccagtttaaaagttccaacattgcgaagaaagaactcagaaaagaattgatggatctgggctttaaagtccgctatataagcgaaaattacaagatgatggcgatcgaaggtacagccactcttcaggcagtacaccctaaccaaaactggcattataatatgattaaagctccggaagcgtgggctattacgtctggatcctctagcgttaaagtagcagtcctggatacagggatcgaccataatcacccatccttggccaacttcgtgaatactaatcttggccggtcgtttgttggaggaaacaccatggatgttcaaggtcatggcacacatgttgctggcacgattgcatcttatgggagtgtaagcggagtgatgcgtagtgcgacactgatcccggtcaaagtgctcgataattctggcagcgggtccctttacggtattacgcaaggcatattgtatgccgccgacatcgatgcggacgtcattaacatgtctctgggtggaggaggctataatcagagcatggatgaggctgttcaaacagcagttgctcagggaaccattgtagtagcagcgactggcaatgatggtgcatcgtcgatcagttatcctgctgcctacagcagcgtcattgcggtgggatctgtgacgtccaatcgtacacgatcctcgttttctaactatggatctgggcttgaagttatggcaccgggcagcaacatctacagtacgtatcctaattccagatatacatctttgagtggtacaagcatggctactccgcacgttgcgggcgtagctgggctcattcgcgcagccaacccagacatatctgtcgcgcaagcccgtcagattctgcgggataccgcgcaagaagcaggatcgttcacacagtacggctatggaatcgtcgatgctcatgccgccgttgttgctgcatccggtggtagcggcggc

SEQ ID NO: 194 - protein, 413 aa, synthetic construct
  REGION 1..413: note = Variant of serine peptidase from Bacillus sinesaloumensis
MADQASQANGNQDVIEGELIVSVEPKNGKPDVSIQSAQSVTGQEDVLKSKGFTIVDTLHVEDSSVKPLVSKNFNKKVVEKMGLVYLVQYSPDQFKSSNIAKKELRKELMDLGFKVRYISENYKMMAIEGTATLQAVHPNQNWHYNMIKAPEAWAITSGSSSVKVAVLDTGIDHNHPSLANFVNTNLGRSFVGGNTMDVQGHGTHVAGTIASYGSVSGVMRSATLIPVKVLDNSGSGSLYGITQGILYAADIDADVINMSLGGGGYNQSMDEAVQTAVAQGTIVVAATGNDGASSISYPAAYSSVIAVGSVTSNRTRSSFSNYGSGLEVMAPGSNIYSTYPNSRYTSLSGTSMATPHVAGVAGLIRAANPDISVAQARQILRDTAQEAGSFTQYGYGIVDAHAAVVAASGGSGG

SEQ ID NO: 195 - DNA, 1239 bp, synthetic construct
  misc_feature 1..1239: note = Variant of serine peptidase from Bacillus sinesaloumensis
  source 1..1239: mol_type = other DNA
atggcagatcaagctagtcaagctaatggaaaccaggacgtcattgaaggcgagctgatcgtttcagtggaaccgaagaacggtaaacctgatgtgagcattcaaagtgcacaatccgtaacagggcaggaagacgtccttaaatcgaaaggctttacgatcgttgataccttgcatgtagaggatagcagcgtcaagccactcgtctcgaagaatttcaataagaaagtggtggagaagatgggactggtgtatcttgttcaatactctccggaccagtttaaaagttccaacattgcgaagaaagaactcagaaaagaattgatggatctgggctttaaagtccgctatataagcgaaaattacaagatgatggcgatcgaaggtacagccactcttcaggcagtacaccctaaccaaaactggcattataatatgattaaagctccggaagcgtgggctattacgtctggatcctctagcgttaaagtagcagtcctggatacagggatcgaccataatcacccatccttggccaacttcgtgaatactaatcttggccggtcgtttgttggaggaaacaccatggatgttcaaggtcatggcacacatgttgctggcacgattgcatcttatgggagtgtaagcggagtgatgcagagtgcgacactgatcccggtcaaagtgctcgataattctggcagcgggtccctttacggtattacgcaaggcatattgtatgccgccgacatcgatgcggacgtcattaacatgtctctgggtggaggaggctataatcagagcatggatgaggctgttcaaacagcagttgctcagggaaccattgtagtagcagcgactggcaatgatggtgcatcgtcgatcagttatcctgctgcctacagcagcgtcattgcggtgggatctgtgacgtccaatcgtcagcgatcctcgttttctaactatggatctgggcttgaagttatggcaccgggcagcaacatctacagtacgtatcctaattccagatatacatctttgagtggtacaagcatggctactccgcacgttgcgggcgtagctgggctcattcgcgcagccaacccagacatatctgtcgcgcaagcccgtcagattctgcgggataccgcgcaagaagcaggatcgttcacacagtacggctatggaatcgtcgatgctcatgccgccgttgttgctgcatccggtggtagcggcggc

SEQ ID NO: 196 - protein, 413 aa, synthetic construct
  REGION 1..413: note = Variant of serine peptidase from Bacillus sinesaloumensis
MADQASQANGNQDVIEGELIVSVEPKNGKPDVSIQSAQSVTGQEDVLKSKGFTIVDTLHVEDSSVKPLVSKNFNKKVVEKMGLVYLVQYSPDQFKSSNIAKKELRKELMDLGFKVRYISENYKMMAIEGTATLQAVHPNQNWHYNMIKAPEAWAITSGSSSVKVAVLDTGIDHNHPSLANFVNTNLGRSFVGGNTMDVQGHGTHVAGTIASYGSVSGVMQSATLIPVKVLDNSGSGSLYGITQGILYAADIDADVINMSLGGGGYNQSMDEAVQTAVAQGTIVVAATGNDGASSISYPAAYSSVIAVGSVTSNRQRSSFSNYGSGLEVMAPGSNIYSTYPNSRYTSLSGTSMATPHVAGVAGLIRAANPDISVAQARQILRDTAQEAGSFTQYGYGIVDAHAAVVAASGGSGG

SEQ ID NO: 197 - DNA, 1239 bp, synthetic construct
  misc_feature 1..1239: note = Variant of serine peptidase from Bacillus sinesaloumensis
  source 1..1239: mol_type = other DNA
atggcagatcaagctagtcaagctaatggaaaccaggacgtcattgaaggcgagctgatcgtttcagtggaaccgaagaacggtaaacctgatgtgagcattcaaagtgcacaatccgtaacagggcaggaagacgtccttaaatcgaaaggctttacgatcgttgataccttgcatgtagaggatagcagcgtcaagccactcgtctcgaagaatttcaataagaaagtggtggagaagatgggactggtgtatcttgttcaatactctccggaccagtttaaaagttccaacattgcgaagaaagaactcagaaaagaattgatggatctgggctttaaagtccgctatataagcgaaaattacaagatgatggcgatcgaaggtacagccactcttcaggcagtacaccctaaccaaaactggcattataatatgattaaagctccggaagcgtgggctattacgtctggatcctctagcgttaaagtagcagtcctggatacagggatcgaccataatcacccatccttggccaacttcgtgaatactaatacgggccggtcgtttgttggaggaaacaccatggatgttcaaggtcatggcacacatgttgctggcacgattgcatcttatgggagtgtaagcggagtgatgcagagtgcgacactgatcccggtcaaagtgctcgataattctggcagcgggtccctttacggtattacgcaaggcatattgtatgccgccgacatcgatgcggacgtcattaacatgtctctgggtggaggaggctataatcagagcatggatgaggctgttcaaacagcagttgctcagggaaccattgtagtagcagcgactggcaatgatggtgcatcgtcgatcagttatcctgctgcctacagcagcgtcattgcggtgggatctgtgacgtccaatcgtacacgatcctcgttttctaactatggatctgggcttgaagttatggcaccgggcagcaacatctacagtacgtatcctaattccagatatacatctttgagtggtacaagcatggctactccgcacgttgcgggcgtagctgggctcattcgcgcagccaacccagacatatctgtcgcgcaagcccgtcagattctgcgggataccgcgcaagaagcaggatcgttcacacagtacggctatggaatcgtcgatgctcatgccgccgttgttgctgcatccggtggtagcggcggc

SEQ ID NO: 198 - protein, 413 aa, synthetic construct
  REGION 1..413: note = Variant of serine peptidase from Bacillus sinesaloumensis
MADQASQANGNQDVIEGELIVSVEPKNGKPDVSIQSAQSVTGQEDVLKSKGFTIVDTLHVEDSSVKPLVSKNFNKKVVEKMGLVYLVQYSPDQFKSSNIAKKELRKELMDLGFKVRYISENYKMMAIEGTATLQAVHPNQNWHYNMIKAPEAWAITSGSSSVKVAVLDTGIDHNHPSLANFVNTNTGRSFVGGNTMDVQGHGTHVAGTIASYGSVSGVMQSATLIPVKVLDNSGSGSLYGITQGILYAADIDADVINMSLGGGGYNQSMDEAVQTAVAQGTIVVAATGNDGASSISYPAAYSSVIAVGSVTSNRTRSSFSNYGSGLEVMAPGSNIYSTYPNSRYTSLSGTSMATPHVAGVAGLIRAANPDISVAQARQILRDTAQEAGSFTQYGYGIVDAHAAVVAASGGSGG

SEQ ID NO: 199 - DNA, 1239 bp, synthetic construct
  misc_feature 1..1239: note = Variant of serine peptidase from Bacillus sinesaloumensis
  source 1..1239: mol_type = other DNA
atggcagatcaagctagtcaagctaatggaaaccaggacgtcattgaaggcgagctgatcgtttcagtggaaccgaagaacggtaaacctgatgtgagcattcaaagtgcacaatccgtaacagggcaggaagacgtccttaaatcgaaaggctttacgatcgttgataccttgcatgtagaggatagcagcgtcaagccactcgtctcgaagaatttcaataagaaagtggtggagaagatgggactggtgtatcttgttcaatactctccggaccagtttaaaagttccaacattgcgaagaaagaactcagaaaagaattgatggatctgggctttaaagtccgctatataagcgaaaattacaagatgatggcgatcgaaggtacagccactcttcaggcagtacaccctaaccaaaactggcattataatatgattaaagctccggaagcgtgggctattacgtctggatcctctagcgttaaagtagcagtcctggatacagggatcgaccataatcacccatccttggccaacttcgtgaatactaatcttggccggtcgtttgttggaggaaacaccatggatgttcaaggtcatggcacacatgttgctggcacgattgcatcttatgggagtgtaagcggagtgatgcagagtgcgacactgatcccggtcaaagtgctcgataattctggcagcgggtccctttacggtattacgcaaggcatattgtatgccgccgacatcgatgcggacgtcattaacatgtctctgggtggaggaggctataatcagagcatggatgaggctgttcaaacagcagttgctcagggaaccattgtagtagcagcgactggcaatgatggtgcatcgtcgatcagttatcctgctgcctacagcagcgtcattgcggtgggatctgtgacgtccaatcgtacacgatcctcgttttctaactatggagttgggcttgaagttatggcaccgggcagcaacatctacagtacgtatcctaattccagatatacatctttgagtggtacaagcatggctactccgcacgttgcgggcgtagctgggctcattcgcgcagccaacccagacatatctgtcgcgcaagcccgtcagattctgcgggataccgcgcaagaagcaggatcgttcacacagtacggctatggaatcgtcgatgctcatgccgccgttgttgctgcatccggtggtagcggcggc

SEQ ID NO: 200 - protein, 413 aa, synthetic construct
  REGION 1..413: note = Variant of serine peptidase from Bacillus sinesaloumensis
MADQASQANGNQDVIEGELIVSVEPKNGKPDVSIQSAQSVTGQEDVLKSKGFTIVDTLHVEDSSVKPLVSKNFNKKVVEKMGLVYLVQYSPDQFKSSNIAKKELRKELMDLGFKVRYISENYKMMAIEGTATLQAVHPNQNWHYNMIKAPEAWAITSGSSSVKVAVLDTGIDHNHPSLANFVNTNLGRSFVGGNTMDVQGHGTHVAGTIASYGSVSGVMQSATLIPVKVLDNSGSGSLYGITQGILYAADIDADVINMSLGGGGYNQSMDEAVQTAVAQGTIVVAATGNDGASSISYPAAYSSVIAVGSVTSNRTRSSFSNYGVGLEVMAPGSNIYSTYPNSRYTSLSGTSMATPHVAGVAGLIRAANPDISVAQARQILRDTAQEAGSFTQYGYGIVDAHAAVVAASGGSGG

SEQ ID NO: 201 - DNA, 1239 bp, synthetic construct
  misc_feature 1..1239: note = Variant of serine peptidase from Bacillus sinesaloumensis
  source 1..1239: mol_type = other DNA
atggcagatcaagctagtcaagctaatggaaaccaggacgtcattgaaggcgagctgatcgtttcagtggaaccgaagaacggtaaacctgatgtgagcattcaaagtgcacaatccgtaacagggcaggaagacgtccttaaatcgaaaggctttacgatcgttgataccttgcatgtagaggatagcagcgtcaagccactcgtctcgaagaatttcaataagaaagtggtggagaagatgggactggtgtatcttgttcaatactctccggaccagtttaaaagttccaacattgcgaagaaagaactcagaaaagaattgatggatctgggctttaaagtccgctatataagcgaaaattacaagatgatggcgatcgaaggtacagccactcttcaggcagtacaccctaaccaaaactggcattataatatgattaaagctccggaagcgtgggctattacgtctggatcctctagcgttaaagtagcagtcctggatacagggatcgaccataatcacccatccttggccaacttcgtgaatactaatcttggccggtcgtttgttggaggaaacaccatggatgttcaaggtcatggcacacatgttgctggcacgattgcatcttatgggagtgtaagcggagtgatgcagagtgcgacactgatcccggtcaaagtgctcgataattctggcagcgggtccctttacggtattacgcaaggcatattgtatgccgccgacatcgatgcggacgtcattaacatgtctctgggtggaggaggctataatcagagcatggatgaggctgttcaaacagcagttgctcagggaaccattgtagtagcagcgactggcaatgatggtgcatcgtcgatcagttatcctgctgcctacagcagcgtcattgcggtgggatctgtgacgtcctctcgtacacgatcctcgttttctaactatggatctgggcttgaagttatggcaccgggcagcaacatctacagtacgtatcctaattccagatatacatctttgagtggtacaagcatggctactccgcacgttgcgggcgtagctgggctcattcgcgcagccaacccagacatatctgtcgcgcaagcccgtcagattctgcgggataccgcgcaagaagcaggatcgttcacacagtacggctatggaatcgtcgatgctcatgccgccgttgttgctgcatccggtggtagcggcggc

SEQ ID NO: 202 - protein, 413 aa, synthetic construct
  REGION 1..413: note = Variant of serine peptidase from Bacillus sinesaloumensis
MADQASQANGNQDVIEGELIVSVEPKNGKPDVSIQSAQSVTGQEDVLKSKGFTIVDTLHVEDSSVKPLVSKNFNKKVVEKMGLVYLVQYSPDQFKSSNIAKKELRKELMDLGFKVRYISENYKMMAIEGTATLQAVHPNQNWHYNMIKAPEAWAITSGSSSVKVAVLDTGIDHNHPSLANFVNTNLGRSFVGGNTMDVQGHGTHVAGTIASYGSVSGVMQSATLIPVKVLDNSGSGSLYGITQGILYAADIDADVINMSLGGGGYNQSMDEAVQTAVAQGTIVVAATGNDGASSISYPAAYSSVIAVGSVTSSRTRSSFSNYGSGLEVMAPGSNIYSTYPNSRYTSLSGTSMATPHVAGVAGLIRAANPDISVAQARQILRDTAQEAGSFTQYGYGIVDAHAAVVAASGGSGG

SEQ ID NO: 203 - DNA, 1239 bp, synthetic construct
  misc_feature 1..1239: note = Variant of serine peptidase from Bacillus sinesaloumensis
  source 1..1239: mol_type = other DNA
atggcagatcaagctagtcaagctaatggaaaccaggacgtcattgaaggcgagctgatcgtttcagtggaaccgaagaacggtaaacctgatgtgagcattcaaagtgcacaatccgtaacagggcaggaagacgtccttaaatcgaaaggctttacgatcgttgataccttgcatgtagaggatagcagcgtcaagccactcgtctcgaagaatttcaataagaaagtggtggagaagatgggactggtgtatcttgttcaatactctccggaccagtttaaaagttccaacattgcgaagaaagaactcagaaaagaattgatggatctgggctttaaagtccgctatataagcgaaaattacaagatgatggcgatcgaaggtacagccgatcttcaggcagtacaccctaaccaaaactggcattataatatgattaaagctccggaagcgtgggctattacgtctggatcctctagcgttaaagtagcagtcctggatacagggatcgaccataatcacccatccttggccaacttcgtgaatactaatcttggccggtcgtttgttggaggaaacaccatggatgttcaaggtcatggcacacatgttgctggcacgattgcatcttatgggagtgtaagcggagtgatgcagagtgcgacactgatcccggtcaaagtgctcgataattctggcagcgggtccctttacggtattacgcaaggcatattgtatgccgccgacatcgatgcggacgtcattaacatgtctctgggtggaggaggctataatcagagcatggatgaggctgttcaaacagcagttgctcagggaaccattgtagtagcagcgactggcaatgatggtgcatcgtcgatcagttatcctgctgcctacagcagcgtcattgcggtgggatctgtgacgtccaatcgtacacgatcctcgttttctaactatggatctgggcttgaagttatggcaccgggcagcaacatctacagtacgtatcctaattccagatatacatctttgagtggtacaagcatggctactccgcacgttgcgggcgtagctgggctcattcgcgcagccaacccagacatatctgtcgcgcaagcccgtcagattctgcgggataccgcgcaagaagcaggatcgttcacacagtacggctatggaatcgtcgatgctcatgccgccgttgttgctgcatccggtggtagcggcggc

SEQ ID NO: 204 - protein, 413 aa, synthetic construct
  REGION 1..413: note = Variant of serine peptidase from Bacillus sinesaloumensis
MADQASQANGNQDVIEGELIVSVEPKNGKPDVSIQSAQSVTGQEDVLKSKGFTIVDTLHVEDSSVKPLVSKNFNKKVVEKMGLVYLVQYSPDQFKSSNIAKKELRKELMDLGFKVRYISENYKMMAIEGTADLQAVHPNQNWHYNMIKAPEAWAITSGSSSVKVAVLDTGIDHNHPSLANFVNTNLGRSFVGGNTMDVQGHGTHVAGTIASYGSVSGVMQSATLIPVKVLDNSGSGSLYGITQGILYAADIDADVINMSLGGGGYNQSMDEAVQTAVAQGTIVVAATGNDGASSISYPAAYSSVIAVGSVTSNRTRSSFSNYGSGLEVMAPGSNIYSTYPNSRYTSLSGTSMATPHVAGVAGLIRAANPDISVAQARQILRDTAQEAGSFTQYGYGIVDAHAAVVAASGGSGG

SEQ ID NO: 205 - DNA, 1239 bp, synthetic construct
  misc_feature 1..1239: note = Variant of serine peptidase from Bacillus sinesaloumensis
  source 1..1239: mol_type = other DNA
atggcagatcaagctagtcaagctaatggaaaccaggacgtcattgaaggcgagctgatcgtttcagtggaaccgaagaacggtaaacctgatgtgagcattcaaagtgcacaatccgtaacagggcaggaagacgtccttaaatcgaaaggctttacgatcgttgataccttgcatgtagaggatagcagcgtcaagccactcgtctcgaagaatttcaataagaaagtggtggagaagatgggactggtgtatcttgttcaatactctccggaccagtttaaaagttccaacattgcgaagaaagaactcagaaaagaattgatggatctgggctttaaagtccgctatataagcgaaaattacaagatgatggcgatcgaaggtacagccactcttcaggcagtacaccctaaccaacggtggcattataatatgattaaagctccggaagcgtgggctattacgtctggatcctctagcgttaaagtagcagtcctggatacagggatcgaccataatcacccatccttggccaacttcgtgaatactaatcttggccggtcgtttgttggaggaaacaccatggatgttcaaggtcatggcacacatgttgctggcacgattgcatcttatgggagtgtaagcggagtgatgcagagtgcgacactgatcccggtcaaagtgctcgataattctggcagcgggtccctttacggtattacgcaaggcatattgtatgccgccgacatcgatgcggacgtcattaacatgtctctgggtggaggaggctataatcagagcatggatgaggctgttcaaacagcagttgctcagggaaccattgtagtagcagcgactggcaatgatggtgcatcgtcgatcagttatcctgctgtctacagcagcgtcattgcggtgggatctgtgacgtccaatcgtacacgatcctcgttttctaactatggatctgggcttgaagttatggcaccgggcagcaacatctacagtacgtatcctaattccagatatacatctttgagtggtacaagcatggctactccgcacgttgcgggcgtagctgggctcattcgcgcagccaacccagacatatctgtcgcgcaagcccgtcagattctgcgggataccgcgcaagaagcaggatcgttcacacagtacggctatggaatcgtcgatgctcatgccgccgttgttgctgcatccggtggtagcggcggc

SEQ ID NO: 206 - protein, 413 aa, synthetic construct
  REGION 1..413: note = Variant of serine peptidase from Bacillus sinesaloumensis
MADQASQANGNQDVIEGELIVSVEPKNGKPDVSIQSAQSVTGQEDVLKSKGFTIVDTLHVEDSSVKPLVSKNFNKKVVEKMGLVYLVQYSPDQFKSSNIAKKELRKELMDLGFKVRYISENYKMMAIEGTATLQAVHPNQRWHYNMIKAPEAWAITSGSSSVKVAVLDTGIDHNHPSLANFVNTNLGRSFVGGNTMDVQGHGTHVAGTIASYGSVSGVMQSATLIPVKVLDNSGSGSLYGITQGILYAADIDADVINMSLGGGGYNQSMDEAVQTAVAQGTIVVAATGNDGASSISYPAVYSSVIAVGSVTSNRTRSSFSNYGSGLEVMAPGSNIYSTYPNSRYTSLSGTSMATPHVAGVAGLIRAANPDISVAQARQILRDTAQEAGSFTQYGYGIVDAHAAVVAASGGSGG

SEQ ID NO: 207 - DNA, 1239 bp, synthetic construct
  misc_feature 1..1239: note = Variant of serine peptidase from Bacillus sinesaloumensis
  source 1..1239: mol_type = other DNA
atggcagatcaagctagtcaagctaatggaaaccaggacgtcattgaaggcgagctgatcgtttcagtggaaccgaagaacggtaaacctgatgtgagcattcaaagtgcacaatccgtaacagggcaggaagacgtccttaaatcgaaaggctttacgatcgttgataccttgcatgtagaggatagcagcgtcaagccactcgtctcgaagaatttcaataagaaagtggtggagaagatgggactggtgtatcttgttcaatactctccggaccagtttaaaagttccaacattgcgaagaaagaactcagaaaagaattgatggatctgggctttaaagtccgctatataagcgaaaattacaagatgatggcgatcgaaggtacagccactcttcaggcagtacaccctaaccaaaactggcattataatatgattaaagctccggaagcgtgggctattacgtctggatcctctagcgttaaagtagcagtcctggatacagggatcgaccataatcacccatccttggccaacttcgtgaatactaatcttggccggtcgtttgttggaggaaacaccatggatgttcaaggtcatggcacacatgttgctggcacgattgcatcttatgggagtgtaagcggagtgatgcagagtgcgacactgatcccggtcaaagtgctcgataattctggcagcgggtccctttacggtattacgcaaggcatattgtatgccgccgacatcgatgcggacgtcattaacatgtctctgggtggaggaggctataatcagagcatggatgaggctgttcaaacagcagttgctcagggaaccattgtagtagcagcgactggcaatgatggtgcatcgtcgatcagttatcctgctgcctacagcagcgtcattgcggtgggatctgtgacgtccaatcgtacacgatcctcgttttctaactatggaattgggcttgaagttatggcaccgggcagcaacatctacagtacgtatcctaattccagatatacatctttgagtggtacaagcatggctactccgcacgttgcgggcgtagctgggctcattcgcgcagccaacccagacatatctgtcgcgcaagcccgtcagattctgcgggataccgcgcaagaagcaggatcgttcacacagtacggctatggaatcgtcgatgctcatgccgccgttgttgctgcatccggtggtagcggcggc

SEQ ID NO: 208 - protein, 413 aa, synthetic construct
  REGION 1..413: note = Variant of serine peptidase from Bacillus sinesaloumensis
MADQASQANGNQDVIEGELIVSVEPKNGKPDVSIQSAQSVTGQEDVLKSKGFTIVDTLHVEDSSVKPLVSKNFNKKVVEKMGLVYLVQYSPDQFKSSNIAKKELRKELMDLGFKVRYISENYKMMAIEGTATLQAVHPNQNWHYNMIKAPEAWAITSGSSSVKVAVLDTGIDHNHPSLANFVNTNLGRSFVGGNTMDVQGHGTHVAGTIASYGSVSGVMQSATLIPVKVLDNSGSGSLYGITQGILYAADIDADVINMSLGGGGYNQSMDEAVQTAVAQGTIVVAATGNDGASSISYPAAYSSVIAVGSVTSNRTRSSFSNYGIGLEVMAPGSNIYSTYPNSRYTSLSGTSMATPHVAGVAGLIRAANPDISVAQARQILRDTAQEAGSFTQYGYGIVDAHAAVVAASGGSGG

SEQ ID NO: 209 - DNA, 1239 bp, synthetic construct
  misc_feature 1..1239: note = Variant of serine peptidase from Bacillus sinesaloumensis
  source 1..1239: mol_type = other DNA
atggcagatcaagctagtcaagctaatggaaaccaggacgtcattgaaggcgagctgatcgtttcagtggaaccgaagaacggtaaacctgatgtgagcattcaaagtgcacaatccgtaacagggcaggaagacgtccttaaatcgaaaggctttacgatcgttgataccttgcatgtagaggatagcagcgtcaagccactcgtctcgaagaatttcaataagaaagtggtggagaagatgggactggtgtatcttgttcaatactctccggaccagtttaaaagttccaacattgcgaagaaagaactcagaaaagaattgatggatctgggctttaaagtccgctatataagcgaaaattacaagatgatggcgatcgaaggtacagccactcttcaggcagtacaccctaaccaaaactggcattataatatgattaaagctccggaagcgtgggctattacgtctggatcctctagcgttaaagtagcagtcctggatacagggatcgaccataatcacccatccttggccaacttcgtgaatactaatcttggccggtcgtttgttggaggaaacaccatggatgttcaaggtcatggcacacatgttgctggcacgattgcatcttatgggagtgtaagcggagtgatgcagagtgcgacactgatcccggtcaaagtgctcgataattctggcagcgggtccctttacggtattacgcaaggcatattgtatgccgccgacatcgatgcggacgtcattaacatgtctctgggtggaggaggctataatcagagcatggatgaggctgttcaaacagcagttgctcagggaaccattgtagtagcagcgactggcaatgatggtgcatcgtcgatcagttatcctgctgcctacagcagcgtcattgcggtgggatctgtgacgtccaatcgtacacgatcctcgttttctaactatggatctgggcttgaagttatggcaccgggcagcaacatctacagtacgtatcctaattccagatatacatctttgagtggtacaagcatggctactccgcacgttgcgggcgtagctgggctcattcgcgcagtgaacccagacatatctgtcgcgcaagcccgtcagattctgcgggataccgcgcaagaagcaggatcgttcacacagtacggctatggaatcgtcgatgctcatgccgccgttgttgctgcatccggtggtagcggcggc

SEQ ID NO: 210 - protein, 413 aa, synthetic construct
  REGION 1..413: note = Variant of serine peptidase from Bacillus sinesaloumensis
MADQASQANGNQDVIEGELIVSVEPKNGKPDVSIQSAQSVTGQEDVLKSKGFTIVDTLHVEDSSVKPLVSKNFNKKVVEKMGLVYLVQYSPDQFKSSNIAKKELRKELMDLGFKVRYISENYKMMAIEGTATLQAVHPNQNWHYNMIKAPEAWAITSGSSSVKVAVLDTGIDHNHPSLANFVNTNLGRSFVGGNTMDVQGHGTHVAGTIASYGSVSGVMQSATLIPVKVLDNSGSGSLYGITQGILYAADIDADVINMSLGGGGYNQSMDEAVQTAVAQGTIVVAATGNDGASSISYPAAYSSVIAVGSVTSNRTRSSFSNYGSGLEVMAPGSNIYSTYPNSRYTSLSGTSMATPHVAGVAGLIRAVNPDISVAQARQILRDTAQEAGSFTQYGYGIVDAHAAVVAASGGSGG

SEQ ID NO: 211 - DNA, 1239 bp, synthetic construct
  misc_feature 1..1239: note = Variant of serine peptidase from Bacillus sinesaloumensis
  source 1..1239: mol_type = other DNA
atggcagatcaagctagtcaagctaatggaaaccaggacgtcattgaaggcgagctgatcgtttcagtggaaccgaagaacggtaaacctgatgtgagcattcaaagtgcacaatccgtaacagggcaggaagacgtccttaaatcgaaaggctttacgatcgttgataccttgcatgtagaggatagcagcgtcaagccactcgtctcgaagaatttcaataagaaagtggtggagaagatgggactggtgtatcttgttcaatactctccggaccagtttaaaagttccaacattgcgaagaaagaactcagaaaagaattgatggatctgggctttaaagtccgctatataagcgaaaattacaagatgatggcgatcgaaggtacagccactcttcaggtggtacaccctaaccaaaactggcattataatatgattaaagctccggaagcgtgggctattacgtctggatcctctagcgttaaagtagcagtcctggatacagggatcgaccataatcacccatccttggccaacttcgtgaatactaatcttggccggtcgtttgttggaggaaacaccatggatgttcaaggtcatggcacacatgttgctggcacgattgcatcttatgggagtgtaagcggagtgatgcagagtgcgacactgatcccggtcaaagtgctcgataattctggcagcgggtccctttacggtattacgcaaggcatattgtatgccgccgacatcgatgcggacgtcattaacatgtctctgggtggaggaggctataatcagagcatggatgaggctgttcaaacagcagttgctcagggaaccattgtagtagcagcgactggcaatgatggtgcatcgtcgatcagttatcctgctgcctacagcagcgtcattgcggtgggatctgtgacgtccaatcgtacacgatcctcgttttctaactatggatctgggcttgaagttatggcaccgggcagcaacatctacagtacgtatcctaattccagatatacatctttgagtggtacaagcatggctactccgcacgttgcgggcgtagctgggctcattcgcgcagccaacccagacatatctgtcgcgcaagcccgtcagattctgcgggataccgcgcaagaagcaggatcgttcacacagtacggctatggaatcgtcgatgctcatgccgccgttgttgctgcatccggtggtagcggcggc

SEQ ID NO: 212 - protein, 413 aa, synthetic construct
  REGION 1..413: note = Variant of serine peptidase from Bacillus sinesaloumensis
MADQASQANGNQDVIEGELIVSVEPKNGKPDVSIQSAQSVTGQEDVLKSKGFTIVDTLHVEDSSVKPLVSKNFNKKVVEKMGLVYLVQYSPDQFKSSNIAKKELRKELMDLGFKVRYISENYKMMAIEGTATLQVVHPNQNWHYNMIKAPEAWAITSGSSSVKVAVLDTGIDHNHPSLANFVNTNLGRSFVGGNTMDVQGHGTHVAGTIASYGSVSGVMQSATLIPVKVLDNSGSGSLYGITQGILYAADIDADVINMSLGGGGYNQSMDEAVQTAVAQGTIVVAATGNDGASSISYPAAYSSVIAVGSVTSNRTRSSFSNYGSGLEVMAPGSNIYSTYPNSRYTSLSGTSMATPHVAGVAGLIRAANPDISVAQARQILRDTAQEAGSFTQYGYGIVDAHAAVVAASGGSGG

SEQ ID NO: 213 - DNA, 1239 bp, synthetic construct
  misc_feature 1..1239: note = Variant of serine peptidase from Bacillus sinesaloumensis
  source 1..1239: mol_type = other DNA
atggcagatcaagctagtcaagctaatggaaaccaggacgtcattgaaggcgagctgatcgtttcagtggaaccgaagaacggtaaacctgatgtgagcattcaaagtgcacaatccgtaacagggcaggaagacgtccttaaatcgaaaggctttacgatcgttgataccttgcatgtagaggatagcagcgtcaagccactcgtctcgaagaatttcaataagaaagtggtggagaagatgggactggtgtatcttgttcaatactctccggaccagtttaaaagttccaacattgcgaagaaagaactcagaaaagaattgatggatctgggctttaaagtccgctatataagcgaaaattacaagatgatggcgatcgaaggtacagccactcttcaggcagtacaccctaaccaaaactggcattataatatgattaaagctccggaagcgtgggctattacgtctggatcctctagcgttaaagtagcagtcctggatacagggatcgaccataatcacccatccttggccaacttcgtgaatactaatcttggccggtcgtttgttggaggaaacaccatggatgttcaaggtcatggcacacatgttgctggcacgattgcatcttatgggagtgtaagcggagtgatgcagagtgcgacactgatcccggtcaaagtgctcgataattctggcagcgggtccctttacggtattacgcaaggcatattgtatgccgccgacatcgatgcggacgtcattaacatgtctctgggtggaggaggctataatcagagcatggatgaggctgttcaaacagcagttgctcagggaaccattgtagtagcagcgactggcaatgatggtgcatcgtcgatcagttatcctgctgcctacagcagcgtcattgcggtgggatctgtgacgtccaatcgtacacgatcctcgttttctaactatggatctgggcttgaagttatggcaccgggcagcaacatctacagtacgtatcctaattccagatatacatctttgagtggtacaagcatggctactccgcacgttgcgggcgtagctgggctcattcgcgcagccaacccactgatatctgtcgcgcaagcccgtcagattctgcgggataccgcgcaagaagcaggatcgttcacacagtacggctatggaatcgtcgatgctcatgccgccgttgttgctgcatccggtggtagcggcggc

SEQ ID NO: 214 - protein, 413 aa, synthetic construct
  REGION 1..413: note = Variant of serine peptidase from Bacillus sinesaloumensis
MADQASQANGNQDVIEGELIVSVEPKNGKPDVSIQSAQSVTGQEDVLKSKGFTIVDTLHVEDSSVKPLVSKNFNKKVVEKMGLVYLVQYSPDQFKSSNIAKKELRKELMDLGFKVRYISENYKMMAIEGTATLQAVHPNQNWHYNMIKAPEAWAITSGSSSVKVAVLDTGIDHNHPSLANFVNTNLGRSFVGGNTMDVQGHGTHVAGTIASYGSVSGVMQSATLIPVKVLDNSGSGSLYGITQGILYAADIDADVINMSLGGGGYNQSMDEAVQTAVAQGTIVVAATGNDGASSISYPAAYSSVIAVGSVTSNRTRSSFSNYGSGLEVMAPGSNIYSTYPNSRYTSLSGTSMATPHVAGVAGLIRAANPLISVAQARQILRDTAQEAGSFTQYGYGIVDAHAAVVAASGGSGG

SEQ ID NO: 215 - DNA, 1239 bp, synthetic construct
  misc_feature 1..1239: note = Variant of serine peptidase from Bacillus sinesaloumensis
  source 1..1239: mol_type = other DNA
atggcagatcaagctagtcaagctaatggaaaccaggacgtcattgaaggcgagctgatcgtttcagtggaaccgaagaacggtaaacctgatgtgagcattcaaagtgcacaatccgtaacagggcaggaagacgtccttaaatcgaaaggctttacgatcgttgataccttgcatgtagaggatagcagcgtcaagccactcgtctcgaagaatttcaataagaaagtggtggagaagatgggactggtgtatcttgttcaatactctccggaccagtttaaaagttccaacattgcgaagaaagaactcagaaaagaattgatggatctgggctttaaagtccgctatataagcgaaaattacaagatgatggcgatcgaaggtacagccggtcttcaggcagtacaccctaaccaaaactggcattataatatgattaaagctccggaagcgtgggctattacgtctggatcctctagcgttaaagtagcagtcctggatacagggatcgaccataatcacccatccttggccaacttcgtgaatactaatcttggccggtcgtttgttggaggaaacaccatggatgttcaaggtcatggcacacatgttgctggcacgattgcatcttatgggagtgtaagcggagtgatgcagagtgcgacactgatcccggtcaaagtgctcgataattctggcagcgggtccctttacggtattacgcaaggcatattgtatgccgccgacatcgatgcggacgtcattaacatgtctctgggtggaggaggctataatcagagcatggatgaggctgttcaaacagcagttgctcagggaaccattgtagtagcagcgactggcaatgatggtgcatcgtcgatcagttatcctgctgcctacagcagcgtcattgcggtgggatctgtgacgtccaatcgtacacgatcctcgttttctaactatggatctgggcttgaagttatggcaccgggcagcaacatctacagtacgtatcctaattccagatatacatctttgagtggtacaagcatggctactccgcacgttgcgggcgtagctgggctcattcgcgcagccaacccagacatatctgtcgcgcaagcccgtcagattctgcgggataccgcgcaagaagcaggatcgttcacacagtacggctatggaatcgtcgatgctcatgccgccgttgttgctgcatccggtggtagcggcggc

SEQ ID NO: 216 - protein, 413 aa, synthetic construct
  REGION 1..413: note = Variant of serine peptidase from Bacillus sinesaloumensis
MADQASQANGNQDVIEGELIVSVEPKNGKPDVSIQSAQSVTGQEDVLKSKGFTIVDTLHVEDSSVKPLVSKNFNKKVVEKMGLVYLVQYSPDQFKSSNIAKKELRKELMDLGFKVRYISENYKMMAIEGTAGLQAVHPNQNWHYNMIKAPEAWAITSGSSSVKVAVLDTGIDHNHPSLANFVNTNLGRSFVGGNTMDVQGHGTHVAGTIASYGSVSGVMQSATLIPVKVLDNSGSGSLYGITQGILYAADIDADVINMSLGGGGYNQSMDEAVQTAVAQGTIVVAATGNDGASSISYPAAYSSVIAVGSVTSNRTRSSFSNYGSGLEVMAPGSNIYSTYPNSRYTSLSGTSMATPHVAGVAGLIRAANPDISVAQARQILRDTAQEAGSFTQYGYGIVDAHAAVVAASGGSGG

SEQ ID NO: 217 - DNA, 1239 bp, synthetic construct
  misc_feature 1..1239: note = Variant of serine peptidase from Bacillus sinesaloumensis
  source 1..1239: mol_type = other DNA
atggcagatcaagctagtcaagctaatggaaaccaggacgtcattgaaggcgagctgatcgtttcagtggaaccgaagaacggtaaacctgatgtgagcattcaaagtgcacaatccgtaacagggcaggaagacgtccttaaatcgaaaggctttacgatcgttgataccttgcatgtagaggatagcagcgtcaagccactcgtctcgaagaatttcaataagaaagtggtggagaagatgggactggtgtatcttgttcaatactctccggaccagtttaaaagttccaacattgcgaagaaagaactcagaaaagaattgatggatctgggctttaaagtccgctatataagcgaaaattacaagatgatggcgatcgaaggtacagccactcttcaggcagtacaccctaaccaaaactggcattataatatgattaaagctccggaagcgtgggctattacgtctggatcctctagcgttaaagtagcagtcctggatacagggatcgaccataatcacccatccttggccaacttcgtgaatactaatcttggccggtcgtttgttggaggaaacaccatggatgttcaaggtcatggcacacatgttgctggcacgattgcatcttatgggagtgtaagcggagtgatgcagagtgcgacactgatcccggtcaaagtgctcgataattctggcagcgggtccctttacggtattacgcaaggcatattgtatgccgccgacatcgatgcggacgtcattaacatgtctctgggtggaggaggctataatgggagcatggatgaggctgttcaaacagcagttgctcagggaaccattgtagtagcagcgactggcaatgatggtgcatcgtcgatcagttatcctgctgcctacagcagcgtcattgcggtgggatctgtgacgtccaatcgtacacgatcctcgttttctaactatggatctgggcttgaagttatggcaccgggcagcaacatctacagtacgtatcctaattccagatatacatctttgagtggtacaagcatggctactccgcacgttgcgggcgtagctgggctcattcgcgcagccaacccagacatatctgtcgcgcaagcccgtcagattctgcgggataccgcgcaagaagcaggatcgttcacacagtacggctatggaatcgtcgatgctcatgccgccgttgttgctgcatccggtggtagcggcggc

SEQ ID NO: 218 - protein, 413 aa, synthetic construct
  REGION 1..413: note = Variant of serine peptidase from Bacillus sinesaloumensis
MADQASQANGNQDVIEGELIVSVEPKNGKPDVSIQSAQSVTGQEDVLKSKGFTIVDTLHVEDSSVKPLVSKNFNKKVVEKMGLVYLVQYSPDQFKSSNIAKKELRKELMDLGFKVRYISENYKMMAIEGTATLQAVHPNQNWHYNMIKAPEAWAITSGSSSVKVAVLDTGIDHNHPSLANFVNTNLGRSFVGGNTMDVQGHGTHVAGTIASYGSVSGVMQSATLIPVKVLDNSGSGSLYGITQGILYAADIDADVINMSLGGGGYNGSMDEAVQTAVAQGTIVVAATGNDGASSISYPAAYSSVIAVGSVTSNRTRSSFSNYGSGLEVMAPGSNIYSTYPNSRYTSLSGTSMATPHVAGVAGLIRAANPDISVAQARQILRDTAQEAGSFTQYGYGIVDAHAAVVAASGGSGG

SEQ ID NO: 219 - DNA, 1239 bp, synthetic construct
  misc_feature 1..1239: note = Variant of serine peptidase from Bacillus sinesaloumensis
  source 1..1239: mol_type = other DNA
atggcagatcaagctagtcaagctaatggaaaccaggacgtcattgaaggcgagctgatcgtttcagtggaaccgaagaacggtaaacctgatgtgagcattcaaagtgcacaatccgtaacagggcaggaagacgtccttaaatcgaaaggctttacgatcgttgataccttgcatgtagaggatagcagcgtcaagccactcgtctcgaagaatttcaataagaaagtggtggagaagatgggactggtgtatcttgttcaatactctccggaccagtttaaaagttccaacattgcgaagaaagaactcagaaaagaattgatggatctgggctttaaagtccgctatataagcgaaaattacaagatgatggcgatcgaaggtacaactactcttcaggcagtacaccctaaccaaaactggcattataatatgattaaagctccggaagcgtgggctattacgtctggatcctctagcgttaaagtagcagtcctggatacagggatcgaccataatcacccatccttggccaacttcgtgaatactaatcttggccggtcgtttgttggaggaaacaccatggatgttcaaggtcatggcacacatgttgctggcacgattgcatcttatgggagtgtaagcggagtgatgcagagtgcgacactgatcccggtcaaagtgctcgataattctggcagcgggtccctttacggtattacgcaaggcatattgtatgccgccgacatcgatgcggacgtcattaacatgtctctgggtggaggaggctataatcagagcatggatgaggctgttcaaacagcagttgctcagggaaccattgtagtagcagcgactggcaatgatggtgcatcgtcgatcagttatcctgctgcctacagcagcgtcattgcggtgggatctgtgacgtccaatcgtacacgatcctcgttttctaactatggatctgggcttgaagttatggcaccgggcagcaacatctacagtacgtatcctaattccagatatacatctttgagtggtacaagcatggctactccgcacgttgcgggcgtagctgggctcattcgcgcagccaacccagacatatctgtcgcgcaagcccgtcagattctgcgggataccgcgcaagaagcaggatcgttcacacagtacggctatggaatcgtcgatgctcatgccgccgttgttgctgcatccggtggtagcggcggc

SEQ ID NO: 220 - protein, 413 aa, synthetic construct
  REGION 1..413: note = Variant of serine peptidase from Bacillus sinesaloumensis
MADQASQANGNQDVIEGELIVSVEPKNGKPDVSIQSAQSVTGQEDVLKSKGFTIVDTLHVEDSSVKPLVSKNFNKKVVEKMGLVYLVQYSPDQFKSSNIAKKELRKELMDLGFKVRYISENYKMMAIEGTTTLQAVHPNQNWHYNMIKAPEAWAITSGSSSVKVAVLDTGIDHNHPSLANFVNTNLGRSFVGGNTMDVQGHGTHVAGTIASYGSVSGVMQSATLIPVKVLDNSGSGSLYGITQGILYAADIDADVINMSLGGGGYNQSMDEAVQTAVAQGTIVVAATGNDGASSISYPAAYSSVIAVGSVTSNRTRSSFSNYGSGLEVMAPGSNIYSTYPNSRYTSLSGTSMATPHVAGVAGLIRAANPDISVAQARQILRDTAQEAGSFTQYGYGIVDAHAAVVAASGGSGG

SEQ ID NO: 221 - DNA, 1239 bp, synthetic construct
  misc_feature 1..1239: note = Variant of serine peptidase from Bacillus sinesaloumensis
  source 1..1239: mol_type = other DNA
atggcagatcaagctagtcaagctaatggaaaccaggacgtcattgaaggcgagctgatcgtttcagtggaaccgaagaacggtaaacctgatgtgagcattcaaagtgcacaatccgtaacagggcaggaagacgtccttaaatcgaaaggctttacgatcgttgataccttgcatgtagaggatagcagcgtcaagccactcgtctcgaagaatttcaataagaaagtggtggagaagatgggactggtgtatcttgttcaatactctccggaccagtttaaaagttccaacattgcgaagaaagaactcagaaaagaattgatggatctgggctttaaagtccgctatataagcgaaaattacaagatgatggcgatcgaaggtacagccactcttcaggcagtacaccctaaccaaaactggcattataatatgattaaagctccggaagcgtgggctattacgtctggatcctctagcgttaaagtagcagtcctggatacagggatcgaccataatcacccatccttggccaacttcgtgaatactaatcttggccggtcgtttgttggaggaaacaccatggatgttcaaggtcatggcacacatgttgctggcacgattgcatcttatgggagtgtaagcggagtgatgcagagtgcgacactgatcccggtcaaagtgctcgataattctggcagcgggtccctttacggtattacgcaaggcatattgtatgccgccgacatcgatgcggacgtcattaacatgtctctgggtggaggaggctatacgcagagcatggatgaggctgttcaaacagcagttgctcagggaaccattgtagtagcagcgactggcaatgatggtgcatcgtcgatcagttatcctgctgcctacagcagcgtcattgcggtgggatctgtgacgtccaatcgtacacgatcctcgttttctaactatggatctgggcttgaagttatggcaccgggcagcaacatctacagtacgtatcctaattccagatatacatctttgagtggtacaagcatggctactccgcacgttgcgggcgtagctgggctcattcgcgcagccaacccagacatatctgtcgcgcaagcccgtcagattctgcgggataccgcgcaagaagcaggatcgttcacacagtacggctatggaatcgtcgatgctcatgccgccgttgttgctgcatccggtggtagcggcggc

SEQ ID NO: 222 - protein, 413 aa, synthetic construct
  REGION 1..413: note = Variant of serine peptidase from Bacillus sinesaloumensis
MADQASQANGNQDVIEGELIVSVEPKNGKPDVSIQSAQSVTGQEDVLKSKGFTIVDTLHVEDSSVKPLVSKNFNKKVVEKMGLVYLVQYSPDQFKSSNIAKKELRKELMDLGFKVRYISENYKMMAIEGTATLQAVHPNQNWHYNMIKAPEAWAITSGSSSVKVAVLDTGIDHNHPSLANFVNTNLGRSFVGGNTMDVQGHGTHVAGTIASYGSVSGVMQSATLIPVKVLDNSGSGSLYGITQGILYAADIDADVINMSLGGGGYTQSMDEAVQTAVAQGTIVVAATGNDGASSISYPAAYSSVIAVGSVTSNRTRSSFSNYGSGLEVMAPGSNIYSTYPNSRYTSLSGTSMATPHVAGVAGLIRAANPDISVAQARQILRDTAQEAGSFTQYGYGIVDAHAAVVAASGGSGG

SEQ ID NO: 223 - DNA, 1239 bp, synthetic construct
  misc_feature 1..1239: note = Variant of serine peptidase from Bacillus sinesaloumensis
  source 1..1239: mol_type = other DNA
atggcagatcaagctagtcaagctaatggaaaccaggacgtcattgaaggcgagctgatcgtttcagtggaaccgaagaacggtaaacctgatgtgagcattcaaagtgcacaatccgtaacagggcaggaagacgtccttaaatcgaaaggctttacgatcgttgataccttgcatgtagaggatagcagcgtcaagccactcgtctcgaagaatttcaataagaaagtggtggagaagatgggactggtgtatcttgttcaatactctccggaccagtttaaaagttccaacattgcgaagaaagaactcagaaaagaattgatggatctgggctttaaagtccgctatataagcgaaaattacaagatgatggcgatcgaaggtacagccactcttcaggcagtacaccctaaccaaaactggcattataatatgattaaagctccggaagcgtgggctattacgtctggatcctctagcgttaaagtagcagtcctggatacagggatcgaccataatcacccatccttgaagaacttcgtgaatactaatcttggccggtcgtttgttggaggaaacaccatggatgttcaaggtcatggcacacatgttgctggcacgattgcatcttatgggagtgtaagcggagtgatgcagagtgcgacactgatcccggtcaaagtgctcgataattctggcagcgggtccctttacggtattacgcaaggcatattgtatgccgccgacatcgatgcggacgtcattaacatgtctctgggtggaggaggctataatcagagcatggatgaggctgttcaaacagcagttgctcagggaaccattgtagtagcagcgactggcaatgatggtgcatcgtcgatcagttatcctgctgcctacagcagcgtcattgcggtgggatctgtgacgtccaatcgtacacgatcctcgttttctaactatggatctgggcttgaagttatggcaccgggcagcaacatctacagtacgtatcctaattccagatatacatctttgagtggtacaagcatggctactccgcacgttgcgggcgtagctgggctcattcgcgcagccaacccagacatatctgtcgcgcaagcccgtcagattctgcgggataccgcgcaagaagcaggatcgttcacacagtacggctatggaatcgtcgatgctcatgccgccgttgttgctgcatccggtggtagcggcggc

SEQ ID NO: 224 - protein, 413 aa, synthetic construct
  REGION 1..413: note = Variant of serine peptidase from Bacillus sinesaloumensis
MADQASQANGNQDVIEGELIVSVEPKNGKPDVSIQSAQSVTGQEDVLKSKGFTIVDTLHVEDSSVKPLVSKNFNKKVVEKMGLVYLVQYSPDQFKSSNIAKKELRKELMDLGFKVRYISENYKMMAIEGTATLQAVHPNQNWHYNMIKAPEAWAITSGSSSVKVAVLDTGIDHNHPSLKNFVNTNLGRSFVGGNTMDVQGHGTHVAGTIASYGSVSGVMQSATLIPVKVLDNSGSGSLYGITQGILYAADIDADVINMSLGGGGYNQSMDEAVQTAVAQGTIVVAATGNDGASSISYPAAYSSVIAVGSVTSNRTRSSFSNYGSGLEVMAPGSNIYSTYPNSRYTSLSGTSMATPHVAGVAGLIRAANPDISVAQARQILRDTAQEAGSFTQYGYGIVDAHAAVVAASGGSGG

SEQ ID NO: 225 - DNA, 1239 bp, synthetic construct
  misc_feature 1..1239: note = Variant of serine peptidase from Bacillus sinesaloumensis
  source 1..1239: mol_type = other DNA
atggcagatcaagctagtcaagctaatggaaaccaggacgtcattgaaggcgagctgatcgtttcagtggaaccgaagaacggtaaacctgatgtgagcattcaaagtgcacaatccgtaacagggcaggaagacgtccttaaatcgaaaggctttacgatcgttgataccttgcatgtagaggatagcagcgtcaagccactcgtctcgaagaatttcaataagaaagtggtggagaagatgggactggtgtatcttgttcaatactctccggaccagtttaaaagttccaacattgcgaagaaagaactcagaaaagaattgatggatctgggctttaaagtccgctatataagcgaaaattacaagatgatggcgatcgaaggtacagccactcttcaggcagtacaccctaaccaaaactggcattataatatgattaaagctccggaagcgtgggctattacgtctggatcctctagcgttaaagtagcagtcctggatacagggatcgaccataatcacccatccttggccaacttcgtgaatactaatcttggccggtcgtttgttggaggaaacaccatggatgttcaaggtcatggcacacatgttgctggcacgattgcatcttatgggagtgtaagcggagtgatgcagagtgcgacactgatcccggtcaaagtgctcgataattctggcagcgggtccctttacggtattacgcaaggcatattgtatgccgccgacatcgatgcggacgtcattaacatgtctctgggtggaggaggctataatcagagcatggatgaggctgttcaaacagcagttgctcagggaaccattgtagtagcagcgactggcaatgatggtgcatcgtcgatcagttatcctgctgcctacagcagcgtcattgcggtgggatctgtgacgtccaatcgtacacgatcctcgttttctaactatggatctgggcttgaagttatggcaccgggcagcaacatctacagtacgtatcctaattccagatatacatctttgagtggtacaagcatggctactccgcacgttgcgggcgtagctgggctcattcgcgcagccaacccagacatagctgtcgcgcaagcccgtcagattctgcgggataccgcgcaagaagcaggatcgttcacacagtacggctatggaatcgtcgatgctcatgccgccgttgttgctgcatccggtggtagcggcggc

SEQ ID NO: 226 - protein, 413 aa, synthetic construct
  REGION 1..413: note = Variant of serine peptidase from Bacillus sinesaloumensis
MADQASQANGNQDVIEGELIVSVEPKNGKPDVSIQSAQSVTGQEDVLKSKGFTIVDTLHVEDSSVKPLVSKNFNKKVVEKMGLVYLVQYSPDQFKSSNIAKKELRKELMDLGFKVRYISENYKMMAIEGTATLQAVHPNQNWHYNMIKAPEAWAITSGSSSVKVAVLDTGIDHNHPSLANFVNTNLGRSFVGGNTMDVQGHGTHVAGTIASYGSVSGVMQSATLIPVKVLDNSGSGSLYGITQGILYAADIDADVINMSLGGGGYNQSMDEAVQTAVAQGTIVVAATGNDGASSISYPAAYSSVIAVGSVTSNRTRSSFSNYGSGLEVMAPGSNIYSTYPNSRYTSLSGTSMATPHVAGVAGLIRAANPDIAVAQARQILRDTAQEAGSFTQYGYGIVDAHAAVVAASGGSGG

SEQ ID NO: 227 - DNA, 1239 bp, synthetic construct
  misc_feature 1..1239: note = Variant of serine peptidase from Bacillus sinesaloumensis
  source 1..1239: mol_type = other DNA
atggcagatcaagctagtcaagctaatggaaaccaggacgtcattgaaggcgagctgatcgtttcagtggaaccgaagaacggtaaacctgatgtgagcattcaaagtgcacaatccgtaacagggcaggaagacgtccttaaatcgaaaggctttacgatcgttgataccttgcatgtagaggatagcagcgtcaagccactcgtctcgaagaatttcaataagaaagtggtggagaagatgggactggtgtatcttgttcaatactctccggaccagtttaaaagttccaacattgcgaagaaagaactcagaaaagaattgatggatctgggctttaaagtccgctatataagcgaaaattacaagatgatggcgatcgaaggtacagccactcttcaggcagtacaccctaaccaaaactggcattataatatgattaaagctccggaagcgtgggctattacgtctggatcctctagcgttaaagtagcagtcctggatacagggatcgaccacaatcacccatccttggccaacttcgtgaatactaatcttggccggtcgtttgttggaggaaacaccatggatgttcaaggtcatggcacacatgttgctggcacgattgcatcttatgggagtgtaagcggagtgatgcagagtgcgacactgatcccggtcaaagtgctcgataattctggcagcgggtccctttacggtattacgcaaggcatattgtatgccgccgacatcgatgcggacgtcattaacatgtctctgggtggaggaggctataatcagagcatggatgaggctgttcaaacagcagttgctcagggaaccattgtagtagcagcgactggcaatgatggtgcatcgtcgatcagttatcctgctgcctacagcagcgtcattgcggtgggatctgtgacgtccaatcgtacacgatcctcgttttctaactatggatctgggcttgaagttatggcaccgggcagcaacatctacagtacgtatcctaattccagatatacatctttgagtggtacaagcatggctactccgcacgttgcgggcgtagctgggctcattcgcgcagccaacccagacatatttgtcgcgcaagcccgtcagattctgcgggataccgcgcaagaagcaggatcgttcacacagtacggctatggaatcgtcgatgctcatgccgccgttgttgctgcatccggtggtagcggcggc

SEQ ID NO: 228 - protein, 413 aa, synthetic construct
  REGION 1..413: note = Variant of serine peptidase from Bacillus sinesaloumensis
MADQASQANGNQDVIEGELIVSVEPKNGKPDVSIQSAQSVTGQEDVLKSKGFTIVDTLHVEDSSVKPLVSKNFNKKVVEKMGLVYLVQYSPDQFKSSNIAKKELRKELMDLGFKVRYISENYKMMAIEGTATLQAVHPNQNWHYNMIKAPEAWAITSGSSSVKVAVLDTGIDHNHPSLANFVNTNLGRSFVGGNTMDVQGHGTHVAGTIASYGSVSGVMQSATLIPVKVLDNSGSGSLYGITQGILYAADIDADVINMSLGGGGYNQSMDEAVQTAVAQGTIVVAATGNDGASSISYPAAYSSVIAVGSVTSNRTRSSFSNYGSGLEVMAPGSNIYSTYPNSRYTSLSGTSMATPHVAGVAGLIRAANPDIFVAQARQILRDTAQEAGSFTQYGYGIVDAHAAVVAASGGSGG

SEQ ID NO: 229 - DNA, 1239 bp, synthetic construct
  misc_feature 1..1239: note = Variant of serine peptidase from Bacillus sinesaloumensis
  source 1..1239: mol_type = other DNA
atggcagatcaagctagtcaagctaatggaaaccaggacgtcattgaaggcgagctgatcgtttcagtggaaccgaagaacggtaaacctgatgtgagcattcaaagtgcacaatccgtaacagggcaggaagacgtccttaaatcgaaaggctttacgatcgttgataccttgcatgtagaggatagcagcgtcaagccactcgtctcgaagaatttcaataagaaagtggtggagaagatgggactggtgtatcttgttcaatactctccggaccagtttaaaagttccaacattgcgaagaaagaactcagaaaagaattgatggatctgggctttaaagtccgctatataagcgaaaattacaagatgatggcgatcgaaggtacagccactcttcaggcagtacaccctaaccaaaactggcattataatatgattaaagctccggaagcgtgggctattacgtctggatcctctagcgttaaagtagcagtcctggatacagggatcgaccataatcacccatccttggccaacttcgtgaatactactcttggccggtcgtttgttggaggaaacaccatggatgttcaaggtcatggcacacatgttgctggcacgattgcatcttatgggagtgtaagcggagtgatgcagagtgcgacactgatcccggtcaaagtgctcgataattctggcagcgggtccctttacggtattacgcaaggcatattgtatgccgccgacatcgatgcggacgtcattaacatgtctctgggtggaggaggctataatcagagcatggatgaggctgttcaaacagcagttgctcagggaaccattgtagtagcagcgactggcaatgatggtgcatcgtcgatcagttatcctgctgcctacagcagcgtcattgcggtgggatctgtgacgtccaatcgtacacgatcctcgttttctaactatggatctgggcttgaagttatggcaccgggcagcaacatctacagtacgtatcctaattccagatatacatctttgagtggtacaagcatggctactccgcacgttgcgggcgtagctgggctcattcgcgcagccaacccagacatatctgtcgcgcaagcccgtcagattctgcgggataccgcgcaagaagcaggatcgttcacacagtacggctatggaatcgtcgatgctcatgccgccgttgttgctgcatccggtggtagcggcggc

SEQ ID NO: 230 - protein, 413 aa, synthetic construct
  REGION 1..413: note = Variant of serine peptidase from Bacillus sinesaloumensis
MADQASQANGNQDVIEGELIVSVEPKNGKPDVSIQSAQSVTGQEDVLKSKGFTIVDTLHVEDSSVKPLVSKNFNKKVVEKMGLVYLVQYSPDQFKSSNIAKKELRKELMDLGFKVRYISENYKMMAIEGTATLQAVHPNQNWHYNMIKAPEAWAITSGSSSVKVAVLDTGIDHNHPSLANFVNTTLGRSFVGGNTMDVQGHGTHVAGTIASYGSVSGVMQSATLIPVKVLDNSGSGSLYGITQGILYAADIDADVINMSLGGGGYNQSMDEAVQTAVAQGTIVVAATGNDGASSISYPAAYSSVIAVGSVTSNRTRSSFSNYGSGLEVMAPGSNIYSTYPNSRYTSLSGTSMATPHVAGVAGLIRAANPDISVAQARQILRDTAQEAGSFTQYGYGIVDAHAAVVAASGGSGG

SEQ ID NO: 231 - DNA, 1239 bp, synthetic construct
  misc_feature 1..1239: note = Variant of serine peptidase from Bacillus sinesaloumensis
  source 1..1239: mol_type = other DNA
atggcagatcaagctagtcaagctaatggaaaccaggacgtcattgaaggcgagctgatcgtttcagtggaaccgaagaacggtaaacctgatgtgagcattcaaagtgcacaatccgtaacagggcaggaagacgtccttaaatcgaaaggctttacgatcgttgataccttgcatgtagaggatagcagcgtcaagccactcgtctcgaagaatttcaataagaaagtggtggagaagatgggactggtgtatcttgttcaatactctccggaccagtttaaaagttccaacattgcgaagaaagaactcagaaaagaattgatggatctgggctttaaagtccgctatataagcgaaaattacaagatgatggcgatcgaaggtacagccactcttcaggcagtacaccctaaccaaaactggcattataatatgattaaagctccggaagcgtgggctattacgtctggatcctctagcgttaaagtagcagtcctggatacagggatcgaccataatcacccatccttggccaacttcgtgaatactaatcttggccggtcgtttgttggaggaaacaccatggatgttcaaggtcatggcacacatgttgctggcacgattgcatcttatgggagtgtaagcggagtgatgcagagtgcgacactgatcccggtcaaagtgctcgataattctggcagcgggtccctttacggtattacgcaaggcatattgtatgccgccgacatcgatgcggacgtcattaacatgtctctgggtggaggaggctataatcagagcatggatgaggctgttcaaacagcagttgctcagggaaccattgtagtagcagcgactggcaatgatggtgcatcgtcgatcagttatcctgctgcctacagcagcgtcattgcggtgggatctgtgacgtccaatcgtacacgatcctcgttttctaactatggagatgggcttgaagttatggcaccgggcagcaacatctacagtacgtatcctaattccagatatacatctttgagtggtacaagcatggctactccgcacgttgcgggcgtagctgggctcattcgcgcagccaacccagacatatctgtcgcgcaagcccgtcagattctgcgggataccgcgcaagaagcaggatcgttcacacagtacggctatggaatcgtcgatgctcatgccgccgttgttgctgcatccggtggtagcggcggc

SEQ ID NO: 232 - protein, 413 aa, synthetic construct
  REGION 1..413: note = Variant of serine peptidase from Bacillus sinesaloumensis
MADQASQANGNQDVIEGELIVSVEPKNGKPDVSIQSAQSVTGQEDVLKSKGFTIVDTLHVEDSSVKPLVSKNFNKKVVEKMGLVYLVQYSPDQFKSSNIAKKELRKELMDLGFKVRYISENYKMMAIEGTATLQAVHPNQNWHYNMIKAPEAWAITSGSSSVKVAVLDTGIDHNHPSLANFVNTNLGRSFVGGNTMDVQGHGTHVAGTIASYGSVSGVMQSATLIPVKVLDNSGSGSLYGITQGILYAADIDADVINMSLGGGGYNQSMDEAVQTAVAQGTIVVAATGNDGASSISYPAAYSSVIAVGSVTSNRTRSSFSNYGDGLEVMAPGSNIYSTYPNSRYTSLSGTSMATPHVAGVAGLIRAANPDISVAQARQILRDTAQEAGSFTQYGYGIVDAHAAVVAASGGSGG

SEQ ID NO: 233 - DNA, 1239 bp, synthetic construct
  misc_feature 1..1239: note = Variant of serine peptidase from Bacillus sinesaloumensis
  source 1..1239: mol_type = other DNA
atggcagatcaagctagtcaagctaatggaaaccaggacgtcattgaaggcgagctgatcgtttcagtggaaccgaagaacggtaaacctgatgtgagcattcaaagtgcacaatccgtaacagggcaggaagacgtccttaaatcgaaaggctttacgatcgttgataccttgcatgtagaggatagcagcgtcaagccactcgtctcgaagaatttcaataagaaagtggtggagaagatgggactggtgtatcttgttcaatactctccggaccagtttaaaagttccaacattgcgaagaaagaactcagaaaagaattgatggatctgggctttaaagtccgctatataagcgaaaattacaagatgatggcgatcgaaggtacagccactcttcagaaggtacaccctaaccaaaactggcattataatatgattaaagctccggaagcgtgggctattacgtctggatcctctagcgttaaagtagcagtcctggatacagggatcgaccataatcacccatccttggccaacttcgtgaatactaatcttggccggtcgtttgttggaggaaacaccatggatgttcaaggtcatggcacacatgttgctggcacgattgcatcttatgggagtgtaagcggagtgatgcagagtgcgacactgatcccggtcaaagtgctcgataattctggcagcgggtccctttacggtattacgcaaggcatattgtatgccgccgacatcgatgcggacgtcattaacatgtctctgggtggaggaggctataatcagagcatggatgaggctgttcaaacagcagttgctcagggaaccattgtagtagcagcgactggcaatgatggtgcatcgtcgatcagttatcctgctgcctacagcagcgtcattgcggtgggatctgtgacgtccaatcgtacacgatcctcgttttctaactatggatctgggcttgaagttatggcaccgggcagcaacatctacagtacgtatcctaattccagatatacatctttgagtggtacaagcatggctactccgcacgttgcgggcgtagctgggctcattcgcgcagccaacccagacatatctgtcgcgcaagcccgtcagattctgcgggataccgcgcaagaagcaggatcgttcacacagtacggctatggaatcgtcgatgctcatgccgccgttgttgctgcatccggtggtagcggcggc

SEQ ID NO: 234 - protein, 413 aa, synthetic construct
  REGION 1..413: note = Variant of serine peptidase from Bacillus sinesaloumensis
MADQASQANGNQDVIEGELIVSVEPKNGKPDVSIQSAQSVTGQEDVLKSKGFTIVDTLHVEDSSVKPLVSKNFNKKVVEKMGLVYLVQYSPDQFKSSNIAKKELRKELMDLGFKVRYISENYKMMAIEGTATLQKVHPNQNWHYNMIKAPEAWAITSGSSSVKVAVLDTGIDHNHPSLANFVNTNLGRSFVGGNTMDVQGHGTHVAGTIASYGSVSGVMQSATLIPVKVLDNSGSGSLYGITQGILYAADIDADVINMSLGGGGYNQSMDEAVQTAVAQGTIVVAATGNDGASSISYPAAYSSVIAVGSVTSNRTRSSFSNYGSGLEVMAPGSNIYSTYPNSRYTSLSGTSMATPHVAGVAGLIRAANPDISVAQARQILRDTAQEAGSFTQYGYGIVDAHAAVVAASGGSGG

SEQ ID NO: 235 - DNA, 1239 bp, synthetic construct
  misc_feature 1..1239: note = Variant of serine peptidase from Bacillus sinesaloumensis
  source 1..1239: mol_type = other DNA
atggcagatcaagctagtcaagctaatggaaaccaggacgtcattgaaggcgagctgatcgtttcagtggaaccgaagaacggtaaacctgatgtgagcattcaaagtgcacaatccgtaacagggcaggaagacgtccttaaatcgaaaggctttacgatcgttgataccttgcatgtagaggatagcagcgtcaagccactcgtctcgaagaatttcaataagaaagtggtggagaagatgggactggtgtatcttgttcaatactctccggaccagtttaaaagttccaacattgcgaagaaagaactcagaaaagaattgatggatctgggctttaaagtccgctatataagcgaaaattacaagatgatggcgatcgaaggtacagccactcttcaggcagtacaccctaaccaaaactggcattataatatgattaaagctccggaagcgtgggctattacgtctggatcctctagcgttaaagtagcagtcctggatacagggatcgaccataatcacccatccttggccaacttcgtgaatactaatcttggcgcgtcgtttgttggaggaaacaccatggatgttcaaggtcatggcacacatgttgctggcacgattgcatcttatgggagtgtaagcggagtgatgcagagtgcgacactgatcccggtcaaagtgctcgataattctggcagcgggtccctttacggtattacgcaaggcatattgtatgccgccgacatcgatgcggacgtcattaacatgtctctgggtggaggaggctataatcagagcatggatgaggctgttcaaacagcagttgctcagggaaccattgtagtagcagcgactggcaatgatggtgcatcgtcgatcagttatcctgctgcctacagcagcgtcattgcggtgggatctgtgacgtccaatcgtacacgatcctcgttttctaactatggatctgggcttgaagttatggcaccgggcagcaacatctacagtacgtatcctaattccagatatacatctttgagtggtacaagcatggctactccgcacgttgcgggcgtagctgggctcattcgcgcagccaacccagacatatctgtcgcgcaagcccgtcagattctgcgggataccgcgcaagaagcaggatcgttcacacagtacggctatggaatcgtcgatgctcatgccgccgttgttgctgcatccggtggtagcggcggc

SEQ ID NO: 236 - protein, 413 aa, synthetic construct
  REGION 1..413: note = Variant of serine peptidase from Bacillus sinesaloumensis
MADQASQANGNQDVIEGELIVSVEPKNGKPDVSIQSAQSVTGQEDVLKSKGFTIVDTLHVEDSSVKPLVSKNFNKKVVEKMGLVYLVQYSPDQFKSSNIAKKELRKELMDLGFKVRYISENYKMMAIEGTATLQAVHPNQNWHYNMIKAPEAWAITSGSSSVKVAVLDTGIDHNHPSLANFVNTNLGASFVGGNTMDVQGHGTHVAGTIASYGSVSGVMQSATLIPVKVLDNSGSGSLYGITQGILYAADIDADVINMSLGGGGYNQSMDEAVQTAVAQGTIVVAATGNDGASSISYPAAYSSVIAVGSVTSNRTRSSFSNYGSGLEVMAPGSNIYSTYPNSRYTSLSGTSMATPHVAGVAGLIRAANPDISVAQARQILRDTAQEAGSFTQYGYGIVDAHAAVVAASGGSGG

SEQ ID NO: 237 - DNA, 1239 bp, synthetic construct
  misc_feature 1..1239: note = Variant of serine peptidase from Bacillus sinesaloumensis
  source 1..1239: mol_type = other DNA
atggcagatcaagctagtcaagctaatggaaaccaggacgtcattgaaggcgagctgatcgtttcagtggaaccgaagaacggtaaacctgatgtgagcattcaaagtgcacaatccgtaacagggcaggaagacgtccttaaatcgaaaggctttacgatcgttgataccttgcatgtagaggatagcagcgtcaagccactcgtctcgaagaatttcaataagaaagtggtggagaagatgggactggtgtatcttgttcaatactctccggaccagtttaaaagttccaacattgcgaagaaagaactcagaaaagaattgatggatctgggctttaaagtccgctatataagcgaaaattacaagatgatggcgatcgaaggtacagccactcttcaggcagtacaccctaaccaagattggcattataatatgattaaagctccggaagcgtgggctattacgtctggatcctctagcgttaaagtagcagtcctggatacagggatcgaccataatcacccatccttggccaacttcgtgaatactaatcttggccggtcgtttgttggaggaaacaccatggatgttcaaggtcatggcacacatgttgctggcacgattgcatcttatgggagtgtaagcggagtgatgcagagtgcgacactgatcccggtcaaagtgctcgataattctggcagcgggtccctttacggtattacgcaaggcatattgtatgccgccgacatcgatgcggacgtcattaacatgtctctgggtggaggaggctataatcagagcatggatgaggctgttcaaacagcagttgctcagggaaccattgtagtagcagcgactggcaatgatggtgcatcgtcgatcagttatcctgctgcctacagcagcgtcattgcggtgggatctgtgacgtccaatcgtacacgatcctcgttttctaactatggatctgggcttgaagttatggcaccgggcagcaacatctacagtacgtatcctaattccagatatacatctttgagtggtacaagcatggctactccgcacgttgcgggcgtagctgggctcattcgcgcagccaacccagacatatctgtcgcgcaagcccgtcagattctgcgggataccgcgcaagaagcaggatcgttcacacagtacggctatggaatcgtcgatgctcatgccgccgttgttgctgcatccggtggtagcggcggc

SEQ ID NO: 238 - protein, 413 aa, synthetic construct
  REGION 1..413: note = Variant of serine peptidase from Bacillus sinesaloumensis
MADQASQANGNQDVIEGELIVSVEPKNGKPDVSIQSAQSVTGQEDVLKSKGFTIVDTLHVEDSSVKPLVSKNFNKKVVEKMGLVYLVQYSPDQFKSSNIAKKELRKELMDLGFKVRYISENYKMMAIEGTATLQAVHPNQDWHYNMIKAPEAWAITSGSSSVKVAVLDTGIDHNHPSLANFVNTNLGRSFVGGNTMDVQGHGTHVAGTIASYGSVSGVMQSATLIPVKVLDNSGSGSLYGITQGILYAADIDADVINMSLGGGGYNQSMDEAVQTAVAQGTIVVAATGNDGASSISYPAAYSSVIAVGSVTSNRTRSSFSNYGSGLEVMAPGSNIYSTYPNSRYTSLSGTSMATPHVAGVAGLIRAANPDISVAQARQILRDTAQEAGSFTQYGYGIVDAHAAVVAASGGSGG

SEQ ID NO: 239 - DNA, 1239 bp, synthetic construct
  misc_feature 1..1239: note = Variant of serine peptidase from Bacillus sinesaloumensis
  source 1..1239: mol_type = other DNA
atggcagatcaagctagtcaagctaatggaaaccaggacgtcattgaaggcgagctgatcgtttcagtggaaccgaagaacggtaaacctgatgtgagcattcaaagtgcacaatccgtaacagggcaggaagacgtccttaaatcgaaaggctttacgatcgttgataccttgcatgtagaggatagcagcgtcaagccactcgtctcgaagaatttcaataagaaagtggtggagaagatgggactggtgtatcttgttcaatactctccggaccagtttaaaagttccaacattgcgaagaaagaactcagaaaagaattgatggatctgggctttaaagtccgctatataagcgaaaattacaagatgatggcgatcgaaggtacagccactcttcaggcagtacaccctaaccaaaactggcattataatatgattaaagctccggaagcgtgggctattacgtctggatcctctagcgttaaagtagcagtcctggatacagggatcgaccataatcacccatccttggccaacttcgtgaatactaatcttggccggtcgtttgttggaggaaacaccatggatgttcaaggtcatggcacacatgttgctggcacgattgcatcttatgggagtgtaagcggagtgatgcagagtgcgacactgatcccggtcaaagtgctcgataattctggcagcgggtccctttacggtattacgcaaggcatattgtatgccgccgacatcgatgcggacgtcattaacatgtctctgggtggaggaggctataatcagagcatggatgaggctgttcaaacagcagttgctcagggaaccattgtagtagcagcgactggcaatgatggtgcatcgtcgatcagttatcctgctgcctacagcagcgtcattgcggtgggatctgtgacgtccaatcgtacacgatcctcgttttctaactatggatctgggcttgaagttatggcaccgggcagcaacatctacagtacgtatcctaattccagatatacatctttgagtggtacaagcatggctactccgcacgttgcgggcgtagctgggctcattcgcgcagccaacccagacatatctgtccttcaagcccgtcagattctgcgggataccgcgcaagaagcaggatcgttcacacagtacggctatggaatcgtcgatgctcatgccgccgttgttgctgcatccggtggtagcggcggc

SEQ ID NO: 240 - protein, 413 aa, synthetic construct
  REGION 1..413: note = Variant of serine peptidase from Bacillus sinesaloumensis
MADQASQANGNQDVIEGELIVSVEPKNGKPDVSIQSAQSVTGQEDVLKSKGFTIVDTLHVEDSSVKPLVSKNFNKKVVEKMGLVYLVQYSPDQFKSSNIAKKELRKELMDLGFKVRYISENYKMMAIEGTATLQAVHPNQNWHYNMIKAPEAWAITSGSSSVKVAVLDTGIDHNHPSLANFVNTNLGRSFVGGNTMDVQGHGTHVAGTIASYGSVSGVMQSATLIPVKVLDNSGSGSLYGITQGILYAADIDADVINMSLGGGGYNQSMDEAVQTAVAQGTIVVAATGNDGASSISYPAAYSSVIAVGSVTSNRTRSSFSNYGSGLEVMAPGSNIYSTYPNSRYTSLSGTSMATPHVAGVAGLIRAANPDISVLQARQILRDTAQEAGSFTQYGYGIVDAHAAVVAASGGSGG

SEQ ID NO: 241 - DNA, 1239 bp, synthetic construct
  misc_feature 1..1239: note = Variant of serine peptidase from Bacillus sinesaloumensis
  source 1..1239: mol_type = other DNA
atggcagatcaagctagtcaagctaatggaaaccaggacgtcattgaaggcgagctgatcgtttcagtggaaccgaagaacggtaaacctgatgtgagcattcaaagtgcacaatccgtaacagggcaggaagacgtccttaaatcgaaaggctttacgatcgttgataccttgcatgtagaggatagcagcgtcaagccactcgtctcgaagaatttcaataagaaagtggtggagaagatgggactggtgtatcttgttcaatactctccggaccagtttaaaagttccaacattgcgaagaaagaactcagaaaagaattgatggatctgggctttaaagtccgctatataagcgaaaattacaagatgatggcgatcgaaggtacagccactcttcaggcagtacaccctaaccaaaactggcattataatatgattaaagctccggaagcgtgggctattacgtctggatcctctagcgttaaagtagcagtcctggatacagggatcgaccataatcacccatccttggccaacttcgtgaatactgatcttggccggtcgtttgttggaggaaacaccatggatgttcaaggtcatggcacacatgttgctggcacgattgcatcttatgggagtgtaagcggagtgatgcagagtgcgacactgatcccggtcaaagtgctcgataattctggcagcgggtccctttacggtattacgcaaggcatattgtatgccgccgacatcgatgcggacgtcattaacatgtctctgggtggaggaggctataatcagagcatggatgaggctgttcaaacagcagttgctcagggaaccattgtagtagcagcgactggcaatgatggtgcatcgtcgatcagttatcctgctgcctacagcagcgtcattgcggtgggatctgtgacgtccaatcgtacacgatcctcgttttctaactatggatctgggcttgaagttatggcaccgggcagcaacatctacagtacgtatcctaattccagatatacatctttgagtggtacaagcatggctactccgcacgttgcgggcgtagctgggctcattcgcgcagccaacccagacatatctgtcgcgcaagcccgtcagattctgcgggataccgcgcaagaagcaggatcgttcacacagtacggctatggaatcgtcgatgctcatgccgccgttgttgctgcatccggtggtagcggcggc

SEQ ID NO: 242 - protein, 413 aa, synthetic construct
  REGION 1..413: note = Variant of serine peptidase from Bacillus sinesaloumensis
MADQASQANGNQDVIEGELIVSVEPKNGKPDVSIQSAQSVTGQEDVLKSKGFTIVDTLHVEDSSVKPLVSKNFNKKVVEKMGLVYLVQYSPDQFKSSNIAKKELRKELMDLGFKVRYISENYKMMAIEGTATLQAVHPNQNWHYNMIKAPEAWAITSGSSSVKVAVLDTGIDHNHPSLANFVNTDLGRSFVGGNTMDVQGHGTHVAGTIASYGSVSGVMQSATLIPVKVLDNSGSGSLYGITQGILYAADIDADVINMSLGGGGYNQSMDEAVQTAVAQGTIVVAATGNDGASSISYPAAYSSVIAVGSVTSNRTRSSFSNYGSGLEVMAPGSNIYSTYPNSRYTSLSGTSMATPHVAGVAGLIRAANPDISVAQARQILRDTAQEAGSFTQYGYGIVDAHAAVVAASGGSGG

SEQ ID NO: 243 - DNA, 1239 bp, synthetic construct
  misc_feature 1..1239: note = Variant of serine peptidase from Bacillus sinesaloumensis
  source 1..1239: mol_type = other DNA
atggcagatcaagctagtcaagctaatggaaaccaggacgtcattgaaggcgagctgatcgtttcagtggaaccgaagaacggtaaacctgatgtgagcattcaaagtgcacaatccgtaacagggcaggaagacgtccttaaatcgaaaggctttacgatcgttgataccttgcatgtagaggatagcagcgtcaagccactcgtctcgaagaatttcaataagaaagtggtggagaagatgggactggtgtatcttgttcaatactctccggaccagtttaaaagttccaacattgcgaagaaagaactcagaaaagaattgatggatctgggctttaaagtccgctatataagcgaaaattacaagatgatggcgatcgaaggtaatgccactcttcaggcagtacaccctaaccaaaactggcattataatatgattaaagctccggaagcgtgggctattacgtctggatcctctagcgttaaagtagcagtcctggatacagggatcgaccataatcacccatccttggccaacttcgtgaatactaatcttggccggtcgtttgttggaggaaacaccatggatgttcaaggtcatggcacacatgttgctggcacgattgcatcttatgggagtgtaagcggagtgatgcagagtgcgacactgatcccggtcaaagtgctcgataattctggcagcgggtccctttacggtattacgcaaggcatattgtatgccgccgacatcgatgcggacgtcattaacatgtctctgggtggaggaggctataatcagagcatggatgaggctgttcaaacagcagttgctcagggaaccattgtagtagcagcgactggcaatgatggtgcatcgtcgatcagttatcctgctgcctacagcagcgtcattgcggtgggatctgtgacgtccaatcgtacacgatcctcgttttctaactatggatctgggcttgaagttatggcaccgggcagcaacatctacagtacgtatcctaattccagatatacatctttgagtggtacaagcatggctactccgcacgttgcgggcgtagctgggctcattcgcgcagccaacccagacatatctgtcgcgcaagcccgtcagattctgcgggataccgcgcaagaagcaggatcgttcacacagtacggctatggaatcgtcgatgctcatgccgccgttgttgctgcatccggtggtagcggcggc

SEQ ID NO: 244 - protein, 413 aa, synthetic construct
  REGION 1..413: note = Variant of serine peptidase from Bacillus sinesaloumensis
MADQASQANGNQDVIEGELIVSVEPKNGKPDVSIQSAQSVTGQEDVLKSKGFTIVDTLHVEDSSVKPLVSKNFNKKVVEKMGLVYLVQYSPDQFKSSNIAKKELRKELMDLGFKVRYISENYKMMAIEGNATLQAVHPNQNWHYNMIKAPEAWAITSGSSSVKVAVLDTGIDHNHPSLANFVNTNLGRSFVGGNTMDVQGHGTHVAGTIASYGSVSGVMQSATLIPVKVLDNSGSGSLYGITQGILYAADIDADVINMSLGGGGYNQSMDEAVQTAVAQGTIVVAATGNDGASSISYPAAYSSVIAVGSVTSNRTRSSFSNYGSGLEVMAPGSNIYSTYPNSRYTSLSGTSMATPHVAGVAGLIRAANPDISVAQARQILRDTAQEAGSFTQYGYGIVDAHAAVVAASGGSGG

SEQ ID NO: 245 - DNA, 1239 bp, synthetic construct
  misc_feature 1..1239: note = Variant of serine peptidase from Bacillus sinesaloumensis
  source 1..1239: mol_type = other DNA
atggcagatcaagctagtcaagctaatggaaaccaggacgtcattgaaggcgagctgatcgtttcagtggaaccgaagaacggtaaacctgatgtgagcattcaaagtgcacaatccgtaacagggcaggaagacgtccttaaatcgaaaggctttacgatcgttgataccttgcatgtagaggatagcagcgtcaagccactcgtctcgaagaatttcaataagaaagtggtggagaagatgggactggtgtatcttgttcaatactctccggaccagtttaaaagttccaacattgcgaagaaagaactcagaaaagaattgatggatctgggctttaaagtccgctatataagcgaaaattacaagatgatggcgatcgaaggtacagccactcttcaggcagtacaccctaaccaaaactggcattataatatgattaaagctccggaagcgtgggctattacgtctggatcctctagcgttaaagtagcagtcctggatacagggatcgaccataatcacccatccttggccaacttcgtgaatactaatcttggccggtcgtttgttggaggaaacaccatggatgttcaaggtcatggcacacatgttgctggcacgattgcatcttatgggagtgtaagcggagtgatgcagagtgcgacactgatcccggtcaaagtgctcgataattctggcagcgggtccctttacggtattacgcaaggcatattgtatgccgccgacatcgatgcggacgtcattaacatgtctctgggtggaggaggctataatcagagcatggatgaggctgttcaaacagcagttgctcagggaaccattgtagtagcagcgactggcaatgatggtgcatcgtcgatcagttatcctgctgcctacagcagcgtcattgcggtgggatctgtgacgtccaatcgtacacgatcctcgttttctaactatggatctgggcttgaagttatggcaccgggcagcaacatctacagtacgtatcctaattccagatatacatctttgagtggtacaagcatggctactccgcacgttgcgggcgtagctgggctcattcgcgcagccaacccagttatatctgtcgcgcaagcccgtcagattctgcgggataccgcgcaagaagcaggatcgttcacacagtacggctatggaatcgtcgatgctcatgccgccgttgttgctgcatccggtggtagcggcggc

SEQ ID NO: 246 - protein, 413 aa, synthetic construct
  REGION 1..413: note = Variant of serine peptidase from Bacillus sinesaloumensis
MADQASQANGNQDVIEGELIVSVEPKNGKPDVSIQSAQSVTGQEDVLKSKGFTIVDTLHVEDSSVKPLVSKNFNKKVVEKMGLVYLVQYSPDQFKSSNIAKKELRKELMDLGFKVRYISENYKMMAIEGTATLQAVHPNQNWHYNMIKAPEAWAITSGSSSVKVAVLDTGIDHNHPSLANFVNTNLGRSFVGGNTMDVQGHGTHVAGTIASYGSVSGVMQSATLIPVKVLDNSGSGSLYGITQGILYAADIDADVINMSLGGGGYNQSMDEAVQTAVAQGTIVVAATGNDGASSISYPAAYSSVIAVGSVTSNRTRSSFSNYGSGLEVMAPGSNIYSTYPNSRYTSLSGTSMATPHVAGVAGLIRAANPVISVAQARQILRDTAQEAGSFTQYGYGIVDAHAAVVAASGGSGG

SEQ ID NO: 247 - DNA, 1239 bp, synthetic construct
  misc_feature 1..1239: note = Variant of serine peptidase from Bacillus sinesaloumensis
  source 1..1239: mol_type = other DNA
atggcagatcaagctagtcaagctaatggaaaccaggacgtcattgaaggcgagctgatcgtttcagtggaaccgaagaacggtaaacctgatgtgagcattcaaagtgcacaatccgtaacagggcaggaagacgtccttaaatcgaaaggctttacgatcgttgataccttgcatgtagaggatagcagcgtcaagccactcgtctcgaagaatttcaataagaaagtggtggagaagatgggactggtgtatcttgttcaatactctccggaccagtttaaaagttccaacattgcgaagaaagaactcagaaaagaattgatggatctgggctttaaagtccgctatataagcgaaaattacaagatgatggcgatcgaaggtacagccactcttcaggcagtacaccctaaccaaaactggcattataatatgattaaagctccggaagcgtgggctattacgtctggatcctctcgtgttaaagtagcagtcctggatacagggatcgaccataatcacccatccttggccaacttcgtgaatactaatcttggccggtcgtttgttggaggaaacaccatggatgttcaaggtcatggcacacatgttgctggcacgattgcatcttatgggagtgtaagcggagtgatgcagagtgcgacactgatcccggtcaaagtgctcgataattctggcagcgggtccctttacggtattacgcaaggcatattgtatgccgccgacatcgatgcggacgtcattaacatgtctctgggtggaggaggctataatcagagcatggatgaggctgttcaaacagcagttgctcagggaaccattgtagtagcagcgactggcaatgatggtgcatcgtcgatcagttatcctgctgcctacagcagcgtcattgcggtgggatctgtgacgtccaatcgtacacgatcctcgttttctaactatggatctgggcttgaagttatggcaccgggcagcaacatctacagtacgtatcctaattccagatatacatctttgagtggtacaagcatggctactccgcacgttgcgggcgtagctgggctcattcgcgcagccaacccagacatatctgtcgcgcaagcccgtcagattctgcgggataccgcgcaagaagcaggatcgttcacacagtacggctatggaatcgtcgatgctcatgccgccgttgttgctgcatccggtggtagcggcggc

SEQ ID NO: 248 - protein, 413 aa, synthetic construct
  REGION 1..413: note = Variant of serine peptidase from Bacillus sinesaloumensis
MADQASQANGNQDVIEGELIVSVEPKNGKPDVSIQSAQSVTGQEDVLKSKGFTIVDTLHVEDSSVKPLVSKNFNKKVVEKMGLVYLVQYSPDQFKSSNIAKKELRKELMDLGFKVRYISENYKMMAIEGTATLQAVHPNQNWHYNMIKAPEAWAITSGSSRVKVAVLDTGIDHNHPSLANFVNTNLGRSFVGGNTMDVQGHGTHVAGTIASYGSVSGVMQSATLIPVKVLDNSGSGSLYGITQGILYAADIDADVINMSLGGGGYNQSMDEAVQTAVAQGTIVVAATGNDGASSISYPAAYSSVIAVGSVTSNRTRSSFSNYGSGLEVMAPGSNIYSTYPNSRYTSLSGTSMATPHVAGVAGLIRAANPDISVAQARQILRDTAQEAGSFTQYGYGIVDAHAAVVAASGGSGG

SEQ ID NO: 249 - DNA, 1239 bp, synthetic construct
  misc_feature 1..1239: note = Variant of serine peptidase from Bacillus sinesaloumensis
  source 1..1239: mol_type = other DNA
atggcagatcaagctagtcaagctaatggaaaccaggacgtcattgaaggcgagctgatcgtttcagtggaaccgaagaacggtaaacctgatgtgagcattcaaagtgcacaatccgtaacagggcaggaagacgtccttaaatcgaaaggctttacgatcgttgataccttgcatgtagaggatagcagcgtcaagccactcgtctcgaagaatttcaataagaaagtggtggagaagatgggactggtgtatcttgttcaatactctccggaccagtttaaaagttccaacattgcgaagaaagaactcagaaaagaattgatggatctgggctttaaagtccgctatataagcgaaaattacaagatgatggcgatcgaaggtacagccactcttcaggcagtacaccctaaccaaaactggcattataatatgattaaagctccggaagcgtgggctattacgtctggatcctctagcgttaaagtagcagtcctggatacagggatcgaccataatcacccatccttggccaacttcgtgaatactaatcttggccggtcgtttgttggaggaaacaccatggatgttcaaggtcatggcacacatgttgctggcacgattgcatcttatgggagtgtaagcggagtgatgcagagtgcgacactgatcccggtcaaagtgctcgataattctggcagcgggtccctttacggtattacgcaaggcatattgtatgccgccgacatcgatgcggacgtcattaacatgtctctgggtggaggaggctataatcagagcatggatgaggctgttcaaacagcagttgctcagggaaccattgtagtagcagcgactggcaatgatggtgcatcgtcgatcagttatcctgctgcctacagcagcgtcattgcggtgggatctgtgacgtccaatcgtattcgatcctcgttttctaactatggatctgggcttgaagttatggcaccgggcagcaacatctacagtacgtatcctaattccagatatacatctttgagtggtacaagcatggctactccgcacgttgcgggcgtagctgggctcattcgcgcagccaacccagacatatctgtcgcgcaagcccgtcagattctgcgggataccgcgcaagaagcaggatcgttcacacagtacggctatggaatcgtcgatgctcatgccgccgttgttgctgcatccggtggtagcggcggc

SEQ ID NO: 250 - protein, 413 aa, synthetic construct
  REGION 1..413: note = Variant of serine peptidase from Bacillus sinesaloumensis
MADQASQANGNQDVIEGELIVSVEPKNGKPDVSIQSAQSVTGQEDVLKSKGFTIVDTLHVEDSSVKPLVSKNFNKKVVEKMGLVYLVQYSPDQFKSSNIAKKELRKELMDLGFKVRYISENYKMMAIEGTATLQAVHPNQNWHYNMIKAPEAWAITSGSSSVKVAVLDTGIDHNHPSLANFVNTNLGRSFVGGNTMDVQGHGTHVAGTIASYGSVSGVMQSATLIPVKVLDNSGSGSLYGITQGILYAADIDADVINMSLGGGGYNQSMDEAVQTAVAQGTIVVAATGNDGASSISYPAAYSSVIAVGSVTSNRIRSSFSNYGSGLEVMAPGSNIYSTYPNSRYTSLSGTSMATPHVAGVAGLIRAANPDISVAQARQILRDTAQEAGSFTQYGYGIVDAHAAVVAASGGSGG

SEQ ID NO: 251 - DNA, 1239 bp, synthetic construct
  misc_feature 1..1239: note = Variant of serine peptidase from Bacillus sinesaloumensis
  source 1..1239: mol_type = other DNA
atggcagatcaagctagtcaagctaatggaaaccaggacgtcattgaaggcgagctgatcgtttcagtggaaccgaagaacggtaaacctgatgtgagcattcaaagtgcacaatccgtaacagggcaggaagacgtccttaaatcgaaaggctttacgatcgttgataccttgcatgtagaggatagcagcgtcaagccactcgtctcgaagaatttcaataagaaagtggtggagaagatgggactggtgtatcttgttcaatactctccggaccagtttaaaagttccaacattgcgaagaaagaactcagaaaagaattgatggatctgggctttaaagtccgctatataagcgaaaattacaagatgatggcgatcgaaggtacagccactcttcaggcagtacaccctaaccaaaactggcattataatatgattaaagctccggaagcgtgggctattacgtctggatcctctagcgttaaagtagcagtcctggatacagggatcgaccataatcacccatccttggccaacttcgtgaatactaatcttggccggtcgtttgttggaggaaacaccatggatgttcaaggtcatggcacacatgttgctggcacgattgcatcttatgggagtgtaagcggagtgatgcagagtgcgacactgatcccggtcaaagtgctcgataattctggcagcgggtccctttacggtattacgcaaggcatattgtatgccgccgacatcgatgcggacgtcattaacatgtctctgggtggaggaggctataatcagagcatggatgaggctgttcaaacagcagttgctcagggaaccattgtagtagcagcgactggcaatgatggtgcatcgtcgatcagttatcctgctgcctacagcagcgtcattgcggtgggatctgtgacgtccaatcgtttgcgatcctcgttttctaactatggatctgggcttgaagttatggcaccgggcagcaacatctacagtacgtatcctaattccagatatacatctttgagtggtacaagcatggctactccgcacgttgcgggcgtagctgggctcattcgcgcagccaacccagacatatctgtcgcgcaagcccgtcagattctgcgggataccgcgcaagaagcaggatcgttcacacagtacggctatggaatcgtcgatgctcatgccgccgttgttgctgcatccggtggtagcggcggc

SEQ ID NO: 252 - protein, 413 aa, synthetic construct
  REGION 1..413: note = Variant of serine peptidase from Bacillus sinesaloumensis
MADQASQANGNQDVIEGELIVSVEPKNGKPDVSIQSAQSVTGQEDVLKSKGFTIVDTLHVEDSSVKPLVSKNFNKKVVEKMGLVYLVQYSPDQFKSSNIAKKELRKELMDLGFKVRYISENYKMMAIEGTATLQAVHPNQNWHYNMIKAPEAWAITSGSSSVKVAVLDTGIDHNHPSLANFVNTNLGRSFVGGNTMDVQGHGTHVAGTIASYGSVSGVMQSATLIPVKVLDNSGSGSLYGITQGILYAADIDADVINMSLGGGGYNQSMDEAVQTAVAQGTIVVAATGNDGASSISYPAAYSSVIAVGSVTSNRLRSSFSNYGSGLEVMAPGSNIYSTYPNSRYTSLSGTSMATPHVAGVAGLIRAANPDISVAQARQILRDTAQEAGSFTQYGYGIVDAHAAVVAASGGSGG

SEQ ID NO: 253 - DNA, 1239 bp, synthetic construct
  misc_feature 1..1239: note = Variant of serine peptidase from Bacillus sinesaloumensis
  source 1..1239: mol_type = other DNA
atggcagatcaagctagtcaagctaatggaaaccaggacgtcattgaaggcgagctgatcgtttcagtggaaccgaagaacggtaaacctgatgtgagcattcaaagtgcacaatccgtaacagggcaggaagacgtccttaaatcgaaaggctttacgatcgttgataccttgcatgtagaggatagcagcgtcaagccactcgtctcgaagaatttcaataagaaagtggtggagaagatgggactggtgtatcttgttcaatactctccggaccagtttaaaagttccaacattgcgaagaaagaactcagaaaagaattgatggatctgggctttaaagtccgctatataagcgaaaattacaagatgatggcgatcgaaggtacagccactcttcaggcagtacaccctaaccaaaactggcattataatatgattaaagctccggaagcgtgggctattacgtctggatcctctagcgttaaagtagcagtcctggatacagggatcgaccataatcacccatccttggccaacttcgtgaatactaatcttggccggtcgtttgttggaggaaacaccatggatgttcaaggtcatggcacacatgttgctggcacgattgcatcttatgggagtgtaagcggagtgatgcagagtgcgacactgatcccggtcaaagtgctcgataattctggcagcgggtccctttacggtattacgcaaggcatattgtatgccgccgacatcgatgcggacgtcattaacatgtctctgggtggaggaggctataatcagagcatggatgaggctgttcaaacagcagttgctcagggaaccattgtagtagcagcgactggcaatgatggtgcatcgtcgatcagttatcctgctgcctacagcagcgtcattgcggtgggatctgtgacgtccaatcgtacacgatccaatttttctaactatggatctgggcttgaagttatggcaccgggcagcaacatctacagtacgtatcctaattccagatatacatctttgagtggtacaagcatggctactccgcacgttgcgggcgtagctgggctcattcgcgcagccaacccagacatatctgtcgcgcaagcccgtcagattctgcgggataccgcgcaagaagcaggatcgttcacacagtacggctatggaatcgtcgatgctcatgccgccgttgttgctgcatccggtggtagcggcggc

SEQ ID NO: 254 - protein, 413 aa, synthetic construct
  REGION 1..413: note = Variant of serine peptidase from Bacillus sinesaloumensis
MADQASQANGNQDVIEGELIVSVEPKNGKPDVSIQSAQSVTGQEDVLKSKGFTIVDTLHVEDSSVKPLVSKNFNKKVVEKMGLVYLVQYSPDQFKSSNIAKKELRKELMDLGFKVRYISENYKMMAIEGTATLQAVHPNQNWHYNMIKAPEAWAITSGSSSVKVAVLDTGIDHNHPSLANFVNTNLGRSFVGGNTMDVQGHGTHVAGTIASYGSVSGVMQSATLIPVKVLDNSGSGSLYGITQGILYAADIDADVINMSLGGGGYNQSMDEAVQTAVAQGTIVVAATGNDGASSISYPAAYSSVIAVGSVTSNRTRSNFSNYGSGLEVMAPGSNIYSTYPNSRYTSLSGTSMATPHVAGVAGLIRAANPDISVAQARQILRDTAQEAGSFTQYGYGIVDAHAAVVAASGGSGG

SEQ ID NO: 255 - DNA, 1239 bp, synthetic construct
  misc_feature 1..1239: note = Variant of serine peptidase from Bacillus sinesaloumensis
  source 1..1239: mol_type = other DNA
atggcagatcaagctagtcaagctaatggaaaccaggacgtcattgaaggcgagctgatcgtttcagtggaaccgaagaacggtaaacctgatgtgagcattcaaagtgcacaatccgtaacagggcaggaagacgtccttaaatcgaaaggctttacgatcgttgataccttgcatgtagaggatagcagcgtcaagccactcgtctcgaagaatttcaataagaaagtggtggagaagatgggactggtgtatcttgttcaatactctccggaccagtttaaaagttccaacattgcgaagaaagaactcagaaaagaattgatggatctgggctttaaagtccgctatataagcgaaaattacaagatgatggcgatcgaaggtacagccactcttcaggcagtacaccctaaccaaaactggcattataatatgattaaagctccggaagcgtgggctattacgtctggatcctctagcgttaaagtagcagtcctggatacagggatcgaccataatcacccatccttggccaacttcgtgaatactaatcttggctgttcgtttgttggaggaaacaccatggatgttcaaggtcatggcacacatgttgctggcacgattgcatcttatgggagtgtaagcggagtgatgcagagtgcgacactgatcccggtcaaagtgctcgataattctggcagcgggtccctttacggtattacgcaaggcatattgtatgccgccgacatcgatgcggacgtcattaacatgtctctgggtggaggaggctataatcagagcatggatgaggctgttcaaacagcagttgctcagggaaccattgtagtagcagcgactggcaatgatggtgcatcgtcgatcagttatcctgctgcctacagcagcgtcattgcggtgggatctgtgacgtccaatcgtacacgatcctcgttttctaactatggatctgggcttgaagttatggcaccgggcagcaacatctacagtacgtatcctaattccagatatacatctttgagtggtacaagcatggctactccgcacgttgcgggcgtagctgggctcattcgcgcagccaacccagacatatctgtcgcgcaagcccgtcagattctgcgggataccgcgcaagaagcaggatcgttcacacagtacggctatggaatcgtcgatgctcatgccgccgttgttgctgcatccggtggtagcggcggc

SEQ ID NO: 256 - protein, 413 aa, synthetic construct
  REGION 1..413: note = Variant of serine peptidase from Bacillus sinesaloumensis
MADQASQANGNQDVIEGELIVSVEPKNGKPDVSIQSAQSVTGQEDVLKSKGFTIVDTLHVEDSSVKPLVSKNFNKKVVEKMGLVYLVQYSPDQFKSSNIAKKELRKELMDLGFKVRYISENYKMMAIEGTATLQAVHPNQNWHYNMIKAPEAWAITSGSSSVKVAVLDTGIDHNHPSLANFVNTNLGCSFVGGNTMDVQGHGTHVAGTIASYGSVSGVMQSATLIPVKVLDNSGSGSLYGITQGILYAADIDADVINMSLGGGGYNQSMDEAVQTAVAQGTIVVAATGNDGASSISYPAAYSSVIAVGSVTSNRTRSSFSNYGSGLEVMAPGSNIYSTYPNSRYTSLSGTSMATPHVAGVAGLIRAANPDISVAQARQILRDTAQEAGSFTQYGYGIVDAHAAVVAASGGSGG

SEQ ID NO: 257 - DNA, 1239 bp, synthetic construct
  misc_feature 1..1239: note = Variant of serine peptidase from Bacillus sinesaloumensis
  source 1..1239: mol_type = other DNA
atggcagatcaagctagtcaagctaatggaaaccaggacgtcattgaaggcgagctgatcgtttcagtggaaccgaagaacggtaaacctgatgtgagcattcaaagtgcacaatccgtaacagggcaggaagacgtccttaaatcgaaaggctttacgatcgttgataccttgcatgtagaggatagcagcgtcaagccactcgtctcgaagaatttcaataagaaagtggtggagaagatgggactggtgtatcttgttcaatactctccggaccagtttaaaagttccaacattgcgaagaaagaactcagaaaagaattgatggatctgggctttaaagtccgctatataagcgaaaattacaagatgatggcgatcgaaggtacagccactcttcaggcagtacaccctaaccaaaactggcattataatatgattaaagctccggaagcgtgggctattacgtctggatcctctagcgttaaagtagcagtcctggatacagggatcgaccataatcacccatccttggcccttttcgtgaatactaatcttggccggtcgtttgttggaggaaacaccatggatgttcaaggtcatggcacacatgttgctggcacgattgcatcttatgggagtgtaagcggagtgatgcagagtgcgacactgatcccggtcaaagtgctcgataattctggcagcgggtccctttacggtattacgcaaggcatattgtatgccgccgacatcgatgcggacgtcattaacatgtctctgggtggaggaggctataatcagagcatggatgaggctgttcaaacagcagttgctcagggaaccattgtagtagcagcgactggcaatgatggtgcatcgtcgatcagttatcctgctgcctacagcagcgtcattgcggtgggatctgtgacgtccaatcgtacacgatcctcgttttctaactatggatctgggcttgaagttatggcaccgggcagcaacatctacagtacgtatcctaattccagatatacatctttgagtggtacaagcatggctactccgcacgttgcgggcgtagctgggctcattcgcgcagccaacccagacatatctgtcgcgcaagcccgtcagattctgcgggataccgcgcaagaagcaggatcgttcacacagtacggctatggaatcgtcgatgctcatgccgccgttgttgctgcatccggtggtagcggcggc

SEQ ID NO: 258 - protein, 413 aa, synthetic construct
  REGION 1..413: note = Variant of serine peptidase from Bacillus sinesaloumensis
MADQASQANGNQDVIEGELIVSVEPKNGKPDVSIQSAQSVTGQEDVLKSKGFTIVDTLHVEDSSVKPLVSKNFNKKVVEKMGLVYLVQYSPDQFKSSNIAKKELRKELMDLGFKVRYISENYKMMAIEGTATLQAVHPNQNWHYNMIKAPEAWAITSGSSSVKVAVLDTGIDHNHPSLALFVNTNLGRSFVGGNTMDVQGHGTHVAGTIASYGSVSGVMQSATLIPVKVLDNSGSGSLYGITQGILYAADIDADVINMSLGGGGYNQSMDEAVQTAVAQGTIVVAATGNDGASSISYPAAYSSVIAVGSVTSNRTRSSFSNYGSGLEVMAPGSNIYSTYPNSRYTSLSGTSMATPHVAGVAGLIRAANPDISVAQARQILRDTAQEAGSFTQYGYGIVDAHAAVVAASGGSGG

SEQ ID NO: 259 - DNA, 1239 bp, synthetic construct
  misc_feature 1..1239: note = Variant of serine peptidase from Bacillus sinesaloumensis
  source 1..1239: mol_type = other DNA
atggcagatcaagctagtcaagctaatggaaaccaggacgtcattgaaggcgagctgatcgtttcagtggaaccgaagaacggtaaacctgatgtgagcattcaaagtgcacaatccgtaacagggcaggaagacgtccttaaatcgaaaggctttacgatcgttgataccttgcatgtagaggatagcagcgtcaagccactcgtctcgaagaatttcaataagaaagtggtggagaagatgggactggtgtatcttgttcaatactctccggaccagtttaaaagttccaacattgcgaagaaagaactcagaaaagaattgatggatctgggctttaaagtccgctatataagcgaaaattacaagatgatggcgatcgaaggtacagccactcttcaggcagtacaccctaaccaaaactggcattataatatgattaaagctccggaagcgtgggctattacgtctggatcctctagcgttaaagtagcagtcctggatacagggatcgaccataatcacccatccttggccaacttcgtgaatactaatcttggccggtcgtttgttggaggaaacaccatggatgttcaaggtcatggcacacatgttgctggcacgattgcatcttatgggagtgtaagcggagtgatgcagagtgcgacactgatcccggtcaaagtgctcgataattctggcagcgggtccctttacggtattacgcaaggcatattgtatgccgccgacatcgatgcggacgtcattaacatgtctctgggtggaggaggctataatcagagcatggatgaggctgttcaaacagcagttgctcagggaaccattgtagtagcagcgactggcaatgatggtgcatcgtcgatcagttatcctgctgcctacagcagcgtcattgcggtgggatctgtgacgtccaatcgtacacgatcctcgttttctaactatggatctgggcttgaagttatggcaccgggcagcaacatctacagtacgtatcctaattccagatatacatctttgagtggtacaagcatggctactccgcacgttgcgggcgtagctgggctcattcgcgcagccaacccagacatatatgtcgcgcaagcccgtcagattctgcgggataccgcgcaagaagcaggatcgttcacacagtacggctatggaatcgtcgatgctcatgccgccgttgttgctgcatccggtggtagcggcggc

SEQ ID NO: 260 - protein, 413 aa, synthetic construct
  REGION 1..413: note = Variant of serine peptidase from Bacillus sinesaloumensis
MADQASQANGNQDVIEGELIVSVEPKNGKPDVSIQSAQSVTGQEDVLKSKGFTIVDTLHVEDSSVKPLVSKNFNKKVVEKMGLVYLVQYSPDQFKSSNIAKKELRKELMDLGFKVRYISENYKMMAIEGTATLQAVHPNQNWHYNMIKAPEAWAITSGSSSVKVAVLDTGIDHNHPSLANFVNTNLGRSFVGGNTMDVQGHGTHVAGTIASYGSVSGVMQSATLIPVKVLDNSGSGSLYGITQGILYAADIDADVINMSLGGGGYNQSMDEAVQTAVAQGTIVVAATGNDGASSISYPAAYSSVIAVGSVTSNRTRSSFSNYGSGLEVMAPGSNIYSTYPNSRYTSLSGTSMATPHVAGVAGLIRAANPDIYVAQARQILRDTAQEAGSFTQYGYGIVDAHAAVVAASGGSGG

SEQ ID NO: 261 - DNA, 1239 bp, synthetic construct
  misc_feature 1..1239: note = Variant of serine peptidase from Bacillus sinesaloumensis
  source 1..1239: mol_type = other DNA
atggcagatcaagctagtcaagctaatggaaaccaggacgtcattgaaggcgagctgatcgtttcagtggaaccgaagaacggtaaacctgatgtgagcattcaaagtgcacaatccgtaacagggcaggaagacgtccttaaatcgaaaggctttacgatcgttgataccttgcatgtagaggatagcagcgtcaagccactcgtctcgaagaatttcaataagaaagtggtggagaagatgggactggtgtatcttgttcaatactctccggaccagtttaaaagttccaacattgcgaagaaagaactcagaaaagaattgatggatctgggctttaaagtccgctatataagcgaaaattacaagatgatggcgatcgaaggtacagccactcttcagccggtacaccctaaccaaaactggcattataatatgattaaagctccggaagcgtgggctattacgtctggatcctctagcgttaaagtagcagtcctggatacagggatcgaccataatcacccatccttggccaacttcgtgaatactaatcttggccggtcgtttgttggaggaaacaccatggatgttcaaggtcatggcacacatgttgctggcacgattgcatcttatgggagtgtaagcggagtgatgcagagtgcgacactgatcccggtcaaagtgctcgataattctggcagcgggtccctttacggtattacgcaaggcatattgtatgccgccgacatcgatgcggacgtcattaacatgtctctgggtggaggaggctataatcagagcatggatgaggctgttcaaacagcagttgctcagggaaccattgtagtagcagcgactggcaatgatggtgcatcgtcgatcagttatcctgctgcctacagcagcgtcattgcggtgggatctgtgacgtccaatcgtacacgatcctcgttttctaactatggatctgggcttgaagttatggcaccgggcagcaacatctacagtacgtatcctaattccagatatacatctttgagtggtacaagcatggctactccgcacgttgcgggcgtagctgggctcattcgcgcagccaacccagacatatctgtcgcgcaagcccgtcagattctgcgggataccgcgcaagaagcaggatcgttcacacagtacggctatggaatcgtcgatgctcatgccgccgttgttgctgcatccggtggtagcggcggc

SEQ ID NO: 262 - protein, 413 aa, synthetic construct
  REGION 1..413: note = Variant of serine peptidase from Bacillus sinesaloumensis
MADQASQANGNQDVIEGELIVSVEPKNGKPDVSIQSAQSVTGQEDVLKSKGFTIVDTLHVEDSSVKPLVSKNFNKKVVEKMGLVYLVQYSPDQFKSSNIAKKELRKELMDLGFKVRYISENYKMMAIEGTATLQPVHPNQNWHYNMIKAPEAWAITSGSSSVKVAVLDTGIDHNHPSLANFVNTNLGRSFVGGNTMDVQGHGTHVAGTIASYGSVSGVMQSATLIPVKVLDNSGSGSLYGITQGILYAADIDADVINMSLGGGGYNQSMDEAVQTAVAQGTIVVAATGNDGASSISYPAAYSSVIAVGSVTSNRTRSSFSNYGSGLEVMAPGSNIYSTYPNSRYTSLSGTSMATPHVAGVAGLIRAANPDISVAQARQILRDTAQEAGSFTQYGYGIVDAHAAVVAASGGSGG

SEQ ID NO: 263 - DNA, 1239 bp, synthetic construct
  misc_feature 1..1239: note = Variant of serine peptidase from Bacillus sinesaloumensis
  source 1..1239: mol_type = other DNA
atggcagatcaagctagtcaagctaatggaaaccaggacgtcattgaaggcgagctgatcgtttcagtggaaccgaagaacggtaaacctgatgtgagcattcaaagtgcacaatccgtaacagggcaggaagacgtccttaaatcgaaaggctttacgatcgttgataccttgcatgtagaggatagcagcgtcaagccactcgtctcgaagaatttcaataagaaagtggtggagaagatgggactggtgtatcttgttcaatactctccggaccagtttaaaagttccaacattgcgaagaaagaactcagaaaagaattgatggatctgggctttaaagtccgctatataagcgaaaattacaagatgatggcgatcgaaggtacagccactcttcaggcagtacaccctaaccaaaactggcattataatatgattaaagctccggaagcgtgggctattacgtctggatcctctagcgttaaagtagcagtcctggatacagggatcgaccataatcacccatccttggccaacttcgtgaatactaatcttggccggtcgtttgttggaggaaacaccatggatgttcaaggtcatggcacacatgttgctggcacgattgcatcttatgggagtgtaagcggagtgatgcagagtgcgacactgatcccggtcaaagtgctcgataattctggcagcgggtccctttacggtattacgcaaggcatattgtatgccgccgacatcgatgcggacgtcattaacatgtctctgggtggaggaggctataatcagagcatggatgaggctgttcaaacagcagttgctcagggaaccattgtagtagcagcgactggcaatgatggtgcatcgtcgatcagttatcctgctgcctacagcagcgtcattgcggtgggatctgtgacgtccaatcgtacacgatcctcgttttctaactatggatctgggcttgaagttatggcaccgggcagcaacatctacagtacgtatcctaattccagatatacatctttgagtggtacaagcatggctactccgcacgttgcgggcgtagctgggctcattcgcgcagccaacccagacatatctgtcgcggaggcccgtcagattctgcgggataccgcgcaagaagcaggatcgttcacacagtacggctatggaatcgtcgatgctcatgccgccgttgttgctgcatccggtggtagcggcggc

SEQ ID NO: 264 - protein, 413 aa, synthetic construct
  REGION 1..413: note = Variant of serine peptidase from Bacillus sinesaloumensis
MADQASQANGNQDVIEGELIVSVEPKNGKPDVSIQSAQSVTGQEDVLKSKGFTIVDTLHVEDSSVKPLVSKNFNKKVVEKMGLVYLVQYSPDQFKSSNIAKKELRKELMDLGFKVRYISENYKMMAIEGTATLQAVHPNQNWHYNMIKAPEAWAITSGSSSVKVAVLDTGIDHNHPSLANFVNTNLGRSFVGGNTMDVQGHGTHVAGTIASYGSVSGVMQSATLIPVKVLDNSGSGSLYGITQGILYAADIDADVINMSLGGGGYNQSMDEAVQTAVAQGTIVVAATGNDGASSISYPAAYSSVIAVGSVTSNRTRSSFSNYGSGLEVMAPGSNIYSTYPNSRYTSLSGTSMATPHVAGVAGLIRAANPDISVAEARQILRDTAQEAGSFTQYGYGIVDAHAAVVAASGGSGG

SEQ ID NO: 265 - DNA, 1239 bp, synthetic construct
  misc_feature 1..1239: note = Variant of serine peptidase from Bacillus sinesaloumensis
  source 1..1239: mol_type = other DNA
atggcagatcaagctagtcaagctaatggaaaccaggacgtcattgaaggcgagctgatcgtttcagtggaaccgaagaacggtaaacctgatgtgagcattcaaagtgcacaatccgtaacagggcaggaagacgtccttaaatcgaaaggctttacgatcgttgataccttgcatgtagaggatagcagcgtcaagccactcgtctcgaagaatttcaataagaaagtggtggagaagatgggactggtgtatcttgttcaatactctccggaccagtttaaaagttccaacattgcgaagaaagaactcagaaaagaattgatggatctgggctttaaagtccgctatataagcgaaaattacaagatgatggcgatcgaaggtacagccactcttcaggcagtacaccctaaccaaaactggcattataatatgattaaagctccggaagcgtgggctattacgtctggatcctctagcgttaaagtagcagtcctggatacagggatcgaccataatcacccatccttggccaacttcgtgaatactaatcttggccggtcgtttgttggaggaaacaccatggatgttcaaggtcatggcacacatgttgctggcacgattgcatcttatgggagtgtaagcggagtgatgcagagtgcgacactgatcccggtcaaagtgctcgataattctggcagcgggtccctttacggtattacgcaaggcatattgtatgccgccgacatcgatgcggacgtcattaacatgtctctgggtggaggaggctataatcagagcatggatgaggctgttcaaacagcagttgctcagggaaccattgtagtagcagcgactggcaatgatggtgcatcgtcgatcagttatcctgctgcctacagcagcgtcattgcggtgggatctgtgacgtccaatcgtacacgatcctcgttttctaactatggagctgggcttgaagttatggcaccgggcagcaacatctacagtacgtatcctaattccagatatacatctttgagtggtacaagcatggctactccgcacgttgcgggcgtagctgggctcattcgcgcagccaacccagacatatctgtcgcgcaagcccgtcagattctgcgggataccgcgcaagaagcaggatcgttcacacagtacggctatggaatcgtcgatgctcatgccgccgttgttgctgcatccggtggtagcggcggc

SEQ ID NO: 266 - protein, 413 aa, synthetic construct
  REGION 1..413: note = Variant of serine peptidase from Bacillus sinesaloumensis
MADQASQANGNQDVIEGELIVSVEPKNGKPDVSIQSAQSVTGQEDVLKSKGFTIVDTLHVEDSSVKPLVSKNFNKKVVEKMGLVYLVQYSPDQFKSSNIAKKELRKELMDLGFKVRYISENYKMMAIEGTATLQAVHPNQNWHYNMIKAPEAWAITSGSSSVKVAVLDTGIDHNHPSLANFVNTNLGRSFVGGNTMDVQGHGTHVAGTIASYGSVSGVMQSATLIPVKVLDNSGSGSLYGITQGILYAADIDADVINMSLGGGGYNQSMDEAVQTAVAQGTIVVAATGNDGASSISYPAAYSSVIAVGSVTSNRTRSSFSNYGAGLEVMAPGSNIYSTYPNSRYTSLSGTSMATPHVAGVAGLIRAANPDISVAQARQILRDTAQEAGSFTQYGYGIVDAHAAVVAASGGSGG

SEQ ID NO: 267 - DNA, 1239 bp, synthetic construct
  misc_feature 1..1239: note = Variant of serine peptidase from Bacillus sinesaloumensis
  source 1..1239: mol_type = other DNA
atggcagatcaagctagtcaagctaatggaaaccaggacgtcattgaaggcgagctgatcgtttcagtggaaccgaagaacggtaaacctgatgtgagcattcaaagtgcacaatccgtaacagggcaggaagacgtccttaaatcgaaaggctttacgatcgttgataccttgcatgtagaggatagcagcgtcaagccactcgtctcgaagaatttcaataagaaagtggtggagaagatgggactggtgtatcttgttcaatactctccggaccagtttaaaagttccaacattgcgaagaaagaactcagaaaagaattgatggatctgggctttaaagtccgctatataagcgaaaattacaagatgatggcgatcgaaaagacagccactcttcaggcagtacaccctaaccaaaactggcattataatatgattaaagctccggaagcgtgggctattacgtctggatcctctagcgttaaagtagcagtcctggatacagggatcgaccataatcacccatccttggccaacttcgtgaatactaatcttggccggtcgtttgttggaggaaacaccatggatgttcaaggtcatggcacacatgttgctggcacgattgcatcttatgggagtgtaagcggagtgatgcagagtgcgacactgatcccggtcaaagtgctcgataattctggcagcgggtccctttacggtattacgcaaggcatattgtatgccgccgacatcgatgcggacgtcattaacatgtctctgggtggaggaggctataatcagagcatggatgaggctgttcaaacagcagttgctcagggaaccattgtagtagcagcgactggcaatgatggtgcatcgtcgatcagttatcctgctgcctacagcagcgtcattgcggtgggatctgtgacgtccaatcgtacacgatcctcgttttctaactatggatctgggcttgaagttatggcaccgggcagcaacatctacagtacgtatcctaattccagatatacatctttgagtggtacaagcatggctactccgcacgttgcgggcgtagctgggctcattcgcgcagccaacccagacatatctgtcgcgcaagcccgtcagattctgcgggataccgcgcaagaagcaggatcgttcacacagtacggctatggaatcgtcgatgctcatgccgccgttgttgctgcatccggtggtagcggcggc

SEQ ID NO: 268 - protein, 413 aa, synthetic construct
  REGION 1..413: note = Variant of serine peptidase from Bacillus sinesaloumensis
MADQASQANGNQDVIEGELIVSVEPKNGKPDVSIQSAQSVTGQEDVLKSKGFTIVDTLHVEDSSVKPLVSKNFNKKVVEKMGLVYLVQYSPDQFKSSNIAKKELRKELMDLGFKVRYISENYKMMAIEKTATLQAVHPNQNWHYNMIKAPEAWAITSGSSSVKVAVLDTGIDHNHPSLANFVNTNLGRSFVGGNTMDVQGHGTHVAGTIASYGSVSGVMQSATLIPVKVLDNSGSGSLYGITQGILYAADIDADVINMSLGGGGYNQSMDEAVQTAVAQGTIVVAATGNDGASSISYPAAYSSVIAVGSVTSNRTRSSFSNYGSGLEVMAPGSNIYSTYPNSRYTSLSGTSMATPHVAGVAGLIRAANPDISVAQARQILRDTAQEAGSFTQYGYGIVDAHAAVVAASGGSGG

SEQ ID NO: 269 - DNA, 1239 bp, synthetic construct
  misc_feature 1..1239: note = Variant of serine peptidase from Bacillus sinesaloumensis
  source 1..1239: mol_type = other DNA
atggcagatcaagctagtcaagctaatggaaaccaggacgtcattgaaggcgagctgatcgtttcagtggaaccgaagaacggtaaacctgatgtgagcattcaaagtgcacaatccgtaacagggcaggaagacgtccttaaatcgaaaggctttacgatcgttgataccttgcatgtagaggatagcagcgtcaagccactcgtctcgaagaatttcaataagaaagtggtggagaagatgggactggtgtatcttgttcaatactctccggaccagtttaaaagttccaacattgcgaagaaagaactcagaaaagaattgatggatctgggctttaaagtccgctatataagcgaaaattacaagatgatggcgatcgaaggtacagccactcttatggcagtacaccctaaccaaaactggcattataatatgattaaagctccggaagcgtgggctattacgtctggatcctctagcgttaaagtagcagtcctggatacagggatcgaccataatcacccatccttggccaacttcgtgaatactaatcttggccggtcgtttgttggaggaaacaccatggatgttcaaggtcatggcacacatgttgctggcacgattgcatcttatgggagtgtaagcggagtgatgcagagtgcgacactgatcccggtcaaagtgctcgataattctggcagcgggtccctttacggtattacgcaaggcatattgtatgccgccgacatcgatgcggacgtcattaacatgtctctgggtggaggaggctataatcagagcatggatgaggctgttcaaacagcagttgctcagggaaccattgtagtagcagcgactggcaatgatggtgcatcgtcgatcagttatcctgctgcctacagcagcgtcattgcggtgggatctgtgacgtccaatcgtacacgatcctcgttttctaactatggatctgggcttgaagttatggcaccgggcagcaacatctacagtacgtatcctaattccagatatacatctttgagtggtacaagcatggctactccgcacgttgcgggcgtagctgggctcattcgcgcagccaacccagacatatctgtcgcgcaagcccgtcagattctgcgggataccgcgcaagaagcaggatcgttcacacagtacggctatggaatcgtcgatgctcatgccgccgttgttgctgcatccggtggtagcggcggc

SEQ ID NO: 270 - protein, 413 aa, synthetic construct
  REGION 1..413: note = Variant of serine peptidase from Bacillus sinesaloumensis
MADQASQANGNQDVIEGELIVSVEPKNGKPDVSIQSAQSVTGQEDVLKSKGFTIVDTLHVEDSSVKPLVSKNFNKKVVEKMGLVYLVQYSPDQFKSSNIAKKELRKELMDLGFKVRYISENYKMMAIEGTATLMAVHPNQNWHYNMIKAPEAWAITSGSSSVKVAVLDTGIDHNHPSLANFVNTNLGRSFVGGNTMDVQGHGTHVAGTIASYGSVSGVMQSATLIPVKVLDNSGSGSLYGITQGILYAADIDADVINMSLGGGGYNQSMDEAVQTAVAQGTIVVAATGNDGASSISYPAAYSSVIAVGSVTSNRTRSSFSNYGSGLEVMAPGSNIYSTYPNSRYTSLSGTSMATPHVAGVAGLIRAANPDISVAQARQILRDTAQEAGSFTQYGYGIVDAHAAVVAASGGSGG

SEQ ID NO: 271 - DNA, 1239 bp, synthetic construct
  misc_feature 1..1239: note = Variant of serine peptidase from Bacillus sinesaloumensis
  source 1..1239: mol_type = other DNA
atggcagatcaagctagtcaagctaatggaaaccaggacgtcattgaaggcgagctgatcgtttcagtggaaccgaagaacggtaaacctgatgtgagcattcaaagtgcacaatccgtaacagggcaggaagacgtccttaaatcgaaaggctttacgatcgttgataccttgcatgtagaggatagcagcgtcaagccactcgtctcgaagaatttcaataagaaagtggtggagaagatgggactggtgtatcttgttcaatactctccggaccagtttaaaagttccaacattgcgaagaaagaactcagaaaagaattgatggatctgggctttaaagtccgctatataagcgaaaattacaagatgatggcgatcgaaggtacagccactcttcaggcagtacaccctaaccaaaactggcattataatatgattaaagctccggaagcgtgggctattacgtctggatcctctagcgttaaagtagcagtcctggatacagggatcgaccataatcacccatccttggccaacttcgtgaatggtaatcttggccggtcgtttgttggaggaaacaccatggatgttcaaggtcatggcacacatgttgctggcacgattgcatcttatgggagtgtaagcggagtgatgcagagtgcgacactgatcccggtcaaagtgctcgataattctggcagcgggtccctttacggtattacgcaaggcatattgtatgccgccgacatcgatgcggacgtcattaacatgtctctgggtggaggaggctataatcagagcatggatgaggctgttcaaacagcagttgctcagggaaccattgtagtagcagcgactggcaatgatggtgcatcgtcgatcagttatcctgctgcctacagcagcgtcattgcggtgggatctgtgacgtccaatcgtacacgatcctcgttttctaactatggatctgggcttgaagttatggcaccgggcagcaacatctacagtacgtatcctaattccagatatacatctttgagtggtacaagcatggctactccgcacgttgcgggcgtagctgggctcattcgcgcagccaacccagacatatctgtcgcgcaagcccgtcagattctgcgggataccgcgcaagaagcaggatcgttcacacagtacggctatggaatcgtcgatgctcatgccgccgttgttgctgcatccggtggtagcggcggc

SEQ ID NO: 272 - protein, 413 aa, synthetic construct
  REGION 1..413: note = Variant of serine peptidase from Bacillus sinesaloumensis
MADQASQANGNQDVIEGELIVSVEPKNGKPDVSIQSAQSVTGQEDVLKSKGFTIVDTLHVEDSSVKPLVSKNFNKKVVEKMGLVYLVQYSPDQFKSSNIAKKELRKELMDLGFKVRYISENYKMMAIEGTATLQAVHPNQNWHYNMIKAPEAWAITSGSSSVKVAVLDTGIDHNHPSLANFVNGNLGRSFVGGNTMDVQGHGTHVAGTIASYGSVSGVMQSATLIPVKVLDNSGSGSLYGITQGILYAADIDADVINMSLGGGGYNQSMDEAVQTAVAQGTIVVAATGNDGASSISYPAAYSSVIAVGSVTSNRTRSSFSNYGSGLEVMAPGSNIYSTYPNSRYTSLSGTSMATPHVAGVAGLIRAANPDISVAQARQILRDTAQEAGSFTQYGYGIVDAHAAVVAASGGSGG

SEQ ID NO: 273 - DNA, 1239 bp, synthetic construct
  misc_feature 1..1239: note = Variant of serine peptidase from Bacillus sinesaloumensis
  source 1..1239: mol_type = other DNA
atggcagatcaagctagtcaagctaatggaaaccaggacgtcattgaaggcgagctgatcgtttcagtggaaccgaagaacggtaaacctgatgtgagcattcaaagtgcacaatccgtaacagggcaggaagacgtccttaaatcgaaaggctttacgatcgttgataccttgcatgtagaggatagcagcgtcaagccactcgtctcgaagaatttcaataagaaagtggtggagaagatgggactggtgtatcttgttcaatactctccggaccagtttaaaagttccaacattgcgaagaaagaactcagaaaagaattgatggatctgggctttaaagtccgctatataagcgaaaattacaagatgatggcgatcgaaggtacagccactcttcaggcagtacaccctaaccaaaactggcattataatatgattaaagctccggaagcgtgggctattacgtctggatcctctagcgttaaagtagcagtcctggatacagggatcgaccataatcacccatccttggccaacttcgtgaatactgcgcttggccggtcgtttgttggaggaaacaccatggatgttcaaggtcatggcacacatgttgctggcacgattgcatcttatgggagtgtaagcggagtgatgcagagtgcgacactgatcccggtcaaagtgctcgataattctggcagcgggtccctttacggtattacgcaaggcatattgtatgccgccgacatcgatgcggacgtcattaacatgtctctgggtggaggaggctataatcagagcatggatgaggctgttcaaacagcagttgctcagggaaccattgtagtagcagcgactggcaatgatggtgcatcgtcgatcagttatcctgctgcctacagcagcgtcattgcggtgggatctgtgacgtccaatcgtacacgatcctcgttttctaactatggatctgggcttgaagttatggcaccgggcagcaacatctacagtacgtatcctaattccagatatacatctttgagtggtacaagcatggctactccgcacgttgcgggcgtagctgggctcattcgcgcagccaacccagacatatctgtcgcgcaagcccgtcagattctgcgggataccgcgcaagaagcaggatcgttcacacagtacggctatggaatcgtcgatgctcatgccgccgttgttgctgcatccggtggtagcggcggc

SEQ ID NO: 274 - protein, 413 aa, synthetic construct
  REGION 1..413: note = Variant of serine peptidase from Bacillus sinesaloumensis
MADQASQANGNQDVIEGELIVSVEPKNGKPDVSIQSAQSVTGQEDVLKSKGFTIVDTLHVEDSSVKPLVSKNFNKKVVEKMGLVYLVQYSPDQFKSSNIAKKELRKELMDLGFKVRYISENYKMMAIEGTATLQAVHPNQNWHYNMIKAPEAWAITSGSSSVKVAVLDTGIDHNHPSLANFVNTALGRSFVGGNTMDVQGHGTHVAGTIASYGSVSGVMQSATLIPVKVLDNSGSGSLYGITQGILYAADIDADVINMSLGGGGYNQSMDEAVQTAVAQGTIVVAATGNDGASSISYPAAYSSVIAVGSVTSNRTRSSFSNYGSGLEVMAPGSNIYSTYPNSRYTSLSGTSMATPHVAGVAGLIRAANPDISVAQARQILRDTAQEAGSFTQYGYGIVDAHAAVVAASGGSGG

SEQ ID NO: 275 - DNA, 1239 bp, synthetic construct
  misc_feature 1..1239: note = Variant of serine peptidase from Bacillus sinesaloumensis
  source 1..1239: mol_type = other DNA
atggcagatcaagctagtcaagctaatggaaaccaggacgtcattgaaggcgagctgatcgtttcagtggaaccgaagaacggtaaacctgatgtgagcattcaaagtgcacaatccgtaacagggcaggaagacgtccttaaatcgaaaggctttacgatcgttgataccttgcatgtagaggatagcagcgtcaagccactcgtctcgaagaatttcaataagaaagtggtggagaagatgggactggtgtatcttgttcaatactctccggaccagtttaaaagttccaacattgcgaagaaagaactcagaaaagaattgatggatctgggctttaaagtccgctatataagcgaaaattacaagatgatggcgatcgaacatacagccactcttcaggcagtacaccctaaccaaaactggcattataatatgattaaagctccggaagcgtgggctattacgtctggatcctctagcgttaaagtagcagtcctggatacagggatcgaccataatcacccatccttggccaacttcgtgaatactaatcttggccggtcgtttgttggaggaaacaccatggatgttcaaggtcatggcacacatgttgctggcacgattgcatcttatgggagtgtaagcggagtgatgcagagtgcgacactgatcccggtcaaagtgctcgataattctggcagcgggtccctttacggtattacgcaaggcatattgtatgccgccgacatcgatgcggacgtcattaacatgtctctgggtggaggaggctataatcagagcatggatgaggctgttcaaacagcagttgctcagggaaccattgtagtagcagcgactggcaatgatggtgcatcgtcgatcagttatcctgctgcctacagcagcgtcattgcggtgggatctgtgacgtccaatcgtacacgatcctcgttttctaactatggatctgggcttgaagttatggcaccgggcagcaacatctacagtacgtatcctaattccagatatacatctttgagtggtacaagcatggctactccgcacgttgcgggcgtagctgggctcattcgcgcagccaacccagacatatctgtcgcgcaagcccgtcagattctgcgggataccgcgcaagaagcaggatcgttcacacagtacggctatggaatcgtcgatgctcatgccgccgttgttgctgcatccggtggtagcggcggc

SEQ ID NO: 276 - protein, 413 aa, synthetic construct
  REGION 1..413: note = Variant of serine peptidase from Bacillus sinesaloumensis
MADQASQANGNQDVIEGELIVSVEPKNGKPDVSIQSAQSVTGQEDVLKSKGFTIVDTLHVEDSSVKPLVSKNFNKKVVEKMGLVYLVQYSPDQFKSSNIAKKELRKELMDLGFKVRYISENYKMMAIEHTATLQAVHPNQNWHYNMIKAPEAWAITSGSSSVKVAVLDTGIDHNHPSLANFVNTNLGRSFVGGNTMDVQGHGTHVAGTIASYGSVSGVMQSATLIPVKVLDNSGSGSLYGITQGILYAADIDADVINMSLGGGGYNQSMDEAVQTAVAQGTIVVAATGNDGASSISYPAAYSSVIAVGSVTSNRTRSSFSNYGSGLEVMAPGSNIYSTYPNSRYTSLSGTSMATPHVAGVAGLIRAANPDISVAQARQILRDTAQEAGSFTQYGYGIVDAHAAVVAASGGSGG

SEQ ID NO: 277 - DNA, 1239 bp, synthetic construct
  misc_feature 1..1239: note = Variant of serine peptidase from Bacillus sinesaloumensis
  source 1..1239: mol_type = other DNA
atggcagatcaagctagtcaagctaatggaaaccaggacgtcattgaaggcgagctgatcgtttcagtggaaccgaagaacggtaaacctgatgtgagcattcaaagtgcacaatccgtaacagggcaggaagacgtccttaaatcgaaaggctttacgatcgttgataccttgcatgtagaggatagcagcgtcaagccactcgtctcgaagaatttcaataagaaagtggtggagaagatgggactggtgtatcttgttcaatactctccggaccagtttaaaagttccaacattgcgaagaaagaactcagaaaagaattgatggatctgggctttaaagtccgctatataagcgaaaattacaagatgatggcgatcgaaggtacagccactcttcaggcagtacaccctaaccaaaactggcattataatatgattaaagctccggaagcgtgggctattacgtctggatcctctagcgttaaagtagcagtcctggatacagggatcgaccataatcacccatccttggccaacttcgtgaatactaatcttggcgattcgtttgttggaggaaacaccatggatgttcaaggtcatggcacacatgttgctggcacgattgcatcttatgggagtgtaagcggagtgatgcagagtgcgacactgatcccggtcaaagtgctcgataattctggcagcgggtccctttacggtattacgcaaggcatattgtatgccgccgacatcgatgcggacgtcattaacatgtctctgggtggaggaggctataatcagagcatggatgaggctgttcaaacagcagttgctcagggaaccattgtagtagcagcgactggcaatgatggtgcatcgtcgatcagttatcctgctgcctacagcagcgtcattgcggtgggatctgtgacgtccaatcgtacacgatcctcgttttctaactatggatctgggcttgaagttatggcaccgggcagcaacatctacagtacgtatcctaattccagatatacatctttgagtggtacaagcatggctactccgcacgttgcgggcgtagctgggctcattcgcgcagccaacccagacatatctgtcgcgcaagcccgtcagattctgcgggataccgcgcaagaagcaggatcgttcacacagtacggctatggaatcgtcgatgctcatgccgccgttgttgctgcatccggtggtagcggcggc

SEQ ID NO: 278 - protein, 413 aa, synthetic construct
  REGION 1..413: note = Variant of serine peptidase from Bacillus sinesaloumensis
MADQASQANGNQDVIEGELIVSVEPKNGKPDVSIQSAQSVTGQEDVLKSKGFTIVDTLHVEDSSVKPLVSKNFNKKVVEKMGLVYLVQYSPDQFKSSNIAKKELRKELMDLGFKVRYISENYKMMAIEGTATLQAVHPNQNWHYNMIKAPEAWAITSGSSSVKVAVLDTGIDHNHPSLANFVNTNLGDSFVGGNTMDVQGHGTHVAGTIASYGSVSGVMQSATLIPVKVLDNSGSGSLYGITQGILYAADIDADVINMSLGGGGYNQSMDEAVQTAVAQGTIVVAATGNDGASSISYPAAYSSVIAVGSVTSNRTRSSFSNYGSGLEVMAPGSNIYSTYPNSRYTSLSGTSMATPHVAGVAGLIRAANPDISVAQARQILRDTAQEAGSFTQYGYGIVDAHAAVVAASGGSGG

SEQ ID NO: 279 - DNA, 1239 bp, synthetic construct
  misc_feature 1..1239: note = Variant of serine peptidase from Bacillus sinesaloumensis
  source 1..1239: mol_type = other DNA
atggcagatcaagctagtcaagctaatggaaaccaggacgtcattgaaggcgagctgatcgtttcagtggaaccgaagaacggtaaacctgatgtgagcattcaaagtgcacaatccgtaacagggcaggaagacgtccttaaatcgaaaggctttacgatcgttgataccttgcatgtagaggatagcagcgtcaagccactcgtctcgaagaatttcaataagaaagtggtggagaagatgggactggtgtatcttgttcaatactctccggaccagtttaaaagttccaacattgcgaagaaagaactcagaaaagaattgatggatctgggctttaaagtccgctatataagcgaaaattacaagatgatggcgatcgaaggttttgccactcttcaggcagtacaccctaaccaaaactggcattataatatgattaaagctccggaagcgtgggctattacgtctggatcctctagcgttaaagtagcagtcctggatacagggatcgaccataatcacccatccttggccaacttcgtgaatactaatcttggccggtcgtttgttggaggaaacaccatggatgttcaaggtcatggcacacatgttgctggcacgattgcatcttatgggagtgtaagcggagtgatgcagagtgcgacactgatcccggtcaaagtgctcgataattctggcagcgggtccctttacggtattacgcaaggcatattgtatgccgccgacatcgatgcggacgtcattaacatgtctctgggtggaggaggctataatcagagcatggatgaggctgttcaaacagcagttgctcagggaaccattgtagtagcagcgactggcaatgatggtgcatcgtcgatcagttatcctgctgcctacagcagcgtcattgcggtgggatctgtgacgtccaatcgtacacgatcctcgttttctaactatggatctgggcttgaagttatggcaccgggcagcaacatctacagtacgtatcctaattccagatatacatctttgagtggtacaagcatggctactccgcacgttgcgggcgtagctgggctcattcgcgcagccaacccagacatatctgtcgcgcaagcccgtcagattctgcgggataccgcgcaagaagcaggatcgttcacacagtacggctatggaatcgtcgatgctcatgccgccgttgttgctgcatccggtggtagcggcggc

SEQ ID NO: 280 - protein, 413 aa, synthetic construct
  REGION 1..413: note = Variant of serine peptidase from Bacillus sinesaloumensis
MADQASQANGNQDVIEGELIVSVEPKNGKPDVSIQSAQSVTGQEDVLKSKGFTIVDTLHVEDSSVKPLVSKNFNKKVVEKMGLVYLVQYSPDQFKSSNIAKKELRKELMDLGFKVRYISENYKMMAIEGFATLQAVHPNQNWHYNMIKAPEAWAITSGSSSVKVAVLDTGIDHNHPSLANFVNTNLGRSFVGGNTMDVQGHGTHVAGTIASYGSVSGVMQSATLIPVKVLDNSGSGSLYGITQGILYAADIDADVINMSLGGGGYNQSMDEAVQTAVAQGTIVVAATGNDGASSISYPAAYSSVIAVGSVTSNRTRSSFSNYGSGLEVMAPGSNIYSTYPNSRYTSLSGTSMATPHVAGVAGLIRAANPDISVAQARQILRDTAQEAGSFTQYGYGIVDAHAAVVAASGGSGG

SEQ ID NO: 281 - DNA, 1239 bp, synthetic construct
  misc_feature 1..1239: note = Variant of serine peptidase from Bacillus sinesaloumensis
  source 1..1239: mol_type = other DNA
atggcagatcaagctagtcaagctaatggaaaccaggacgtcattgaaggcgagctgatcgtttcagtggaaccgaagaacggtaaacctgatgtgagcattcaaagtgcacaatccgtaacagggcaggaagacgtccttaaatcgaaaggctttacgatcgttgataccttgcatgtagaggatagcagcgtcaagccactcgtctcgaagaatttcaataagaaagtggtggagaagatgggactggtgtatcttgttcaatactctccggaccagtttaaaagttccaacattgcgaagaaagaactcagaaaagaattgatggatctgggctttaaagtccgctatataagcgaaaattacaagatgatggcgatcgaaggtacagccactcttcaggcagtacaccctaaccaaaactggcattataatatgattaaagctccggaagcgtgggctattacgtctggatcctctagcgttaaagtagcagtcctggatacagggatcgaccataatcacccatccttggccaacttcgtgaatactaatcttggccggtcgtttgttggaggaaacaccatggatgttcaaggtcatggcacacatgttgctggcacgattgcatcttatgggagtgtaagcggagtgatgcagagtgcgacactgatcccggtcaaagtgctcgataattctggcagcgggtccctttacggtattacgcaaggcatattgtatgccgccgacatcgatgcggacgtcattaacatgtctctgggtggaggaggctgtaatcagagcatggatgaggctgttcaaacagcagttgctcagggaaccattgtagtagcagcgactggcaatgatggtgcatcgtcgatcagttatcctgctgcctacagcagcgtcattgcggtgggatctgtgacgtccaatcgtacacgatcctcgttttctaactatggatctgggcttgaagttatggcaccgggcagcaacatctacagtacgtatcctaattccagatatacatctttgagtggtacaagcatggctactccgcacgttgcgggcgtagctgggctcattcgcgcagccaacccagacatatctgtcgcgcaagcccgtcagattctgcgggataccgcgcaagaagcaggatcgttcacacagtacggctatggaatcgtcgatgctcatgccgccgttgttgctgcatccggtggtagcggcggc

SEQ ID NO: 282 - protein, 413 aa, synthetic construct
  REGION 1..413: note = Variant of serine peptidase from Bacillus sinesaloumensis
MADQASQANGNQDVIEGELIVSVEPKNGKPDVSIQSAQSVTGQEDVLKSKGFTIVDTLHVEDSSVKPLVSKNFNKKVVEKMGLVYLVQYSPDQFKSSNIAKKELRKELMDLGFKVRYISENYKMMAIEGTATLQAVHPNQNWHYNMIKAPEAWAITSGSSSVKVAVLDTGIDHNHPSLANFVNTNLGRSFVGGNTMDVQGHGTHVAGTIASYGSVSGVMQSATLIPVKVLDNSGSGSLYGITQGILYAADIDADVINMSLGGGGCNQSMDEAVQTAVAQGTIVVAATGNDGASSISYPAAYSSVIAVGSVTSNRTRSSFSNYGSGLEVMAPGSNIYSTYPNSRYTSLSGTSMATPHVAGVAGLIRAANPDISVAQARQILRDTAQEAGSFTQYGYGIVDAHAAVVAASGGSGG

SEQ ID NO: 283 - DNA, 1239 bp, synthetic construct
  misc_feature 1..1239: note = Variant of serine peptidase from Bacillus sinesaloumensis
  source 1..1239: mol_type = other DNA
atggcagatcaagctagtcaagctaatggaaaccaggacgtcattgaaggcgagctgatcgtttcagtggaaccgaagaacggtaaacctgatgtgagcattcaaagtgcacaatccgtaacagggcaggaagacgtccttaaatcgaaaggctttacgatcgttgataccttgcatgtagaggatagcagcgtcaagccactcgtctcgaagaatttcaataagaaagtggtggagaagatgggactggtgtatcttgttcaatactctccggaccagtttaaaagttccaacattgcgaagaaagaactcagaaaagaattgatggatctgggctttaaagtccgctatataagcgaaaattacaagatgatggcgatcgaaggtacagccactcttcaggcagtacaccctaaccaatggtggcattataatatgattaaagctccggaagcgtgggctattacgtctggatcctctagcgttaaagtagcagtcctggatacagggatcgaccataatcacccatccttggccaacttcgtgaatactaatcttggccggtcgtttgttggaggaaacaccatggatgttcaaggtcatggcacacatgttgctggcacgattgcatcttatgggagtgtaagcggagtgatgcagagtgcgacactgatcccggtcaaagtgctcgataattctggcagcgggtccctttacggtattacgcaaggcatattgtatgccgccgacatcgatgcggacgtcattaacatgtctctgggtggaggaggctataatcagagcatggatgaggctgttcaaacagcagttgctcagggaaccattgtagtagcagcgactggcaatgatggtgcatcgtcgatcagttatcctgctgcctacagcagcgtcattgcggtgggatctgtgacgtccaatcgtacacgatcctcgttttctaactatggatctgggcttgaagttatggcaccgggcagcaacatctacagtacgtatcctaattccagatatacatctttgagtggtacaagcatggctactccgcacgttgcgggcgtagctgggctcattcgcgcagccaacccagacatatctgtcgcgcaagcccgtcagattctgcgggataccgcgcaagaagcaggatcgttcacacagtacggctatggaatcgtcgatgctcatgccgccgttgttgctgcatccggtggtagcggcggc

SEQ ID NO: 284 - protein, 413 aa, synthetic construct
  REGION 1..413: note = Variant of serine peptidase from Bacillus sinesaloumensis
MADQASQANGNQDVIEGELIVSVEPKNGKPDVSIQSAQSVTGQEDVLKSKGFTIVDTLHVEDSSVKPLVSKNFNKKVVEKMGLVYLVQYSPDQFKSSNIAKKELRKELMDLGFKVRYISENYKMMAIEGTATLQAVHPNQWWHYNMIKAPEAWAITSGSSSVKVAVLDTGIDHNHPSLANFVNTNLGRSFVGGNTMDVQGHGTHVAGTIASYGSVSGVMQSATLIPVKVLDNSGSGSLYGITQGILYAADIDADVINMSLGGGGYNQSMDEAVQTAVAQGTIVVAATGNDGASSISYPAAYSSVIAVGSVTSNRTRSSFSNYGSGLEVMAPGSNIYSTYPNSRYTSLSGTSMATPHVAGVAGLIRAANPDISVAQARQILRDTAQEAGSFTQYGYGIVDAHAAVVAASGGSGG

SEQ ID NO: 285 - DNA, 1239 bp, synthetic construct
  misc_feature 1..1239: note = Variant of serine peptidase from Bacillus sinesaloumensis
  source 1..1239: mol_type = other DNA
atggcagatcaagctagtcaagctaatggaaaccaggacgtcattgaaggcgagctgatcgtttcagtggaaccgaagaacggtaaacctgatgtgagcattcaaagtgcacaatccgtaacagggcaggaagacgtccttaaatcgaaaggctttacgatcgttgataccttgcatgtagaggatagcagcgtcaagccactcgtctcgaagaatttcaataagaaagtggtggagaagatgggactggtgtatcttgttcaatactctccggaccagtttaaaagttccaacattgcgaagaaagaactcagaaaagaattgatggatctgggctttaaagtccgctatataagcgaaaattacaagatgatggcgatcgaaggtacagccactcttcaggcagtacaccctaaccaaaactggcattataatatgattaaagctccggaagcgtgggctattacgtctggatcctctagcgttaaagtagcagtcctggatacagggatcgaccataatcacccatccttggccaacttcgtgaatactaatcttggccggtcgtttgttggaggaaacaccatggatgttcaaggtcatggcacacatgttgctggcacgattgcatcttatgggagtgtaagcggagtgatgcagagtgcgacactgatcccggtcaaagtgctcgataattctggcagcgggtccctttacggtattacgcaaggcatattgtatgccgccgacatcgatgcggacgtcattaacatgtctctgggtggaggaggctataatcagagcatggatgaggctgttcaaacagcagttgctcagggaaccattgtagtagcagcgactggcaatgatggtgcatcgtcgatcagttatcctgctgcctacagcagcgtcattgcggtgggatctgtgacgtccaatcgtacacgatcctcgttttctaactatggatgggggcttgaagttatggcaccgggcagcaacatctacagtacgtatcctaattccagatatacatctttgagtggtacaagcatggctactccgcacgttgcgggcgtagctgggctcattcgcgcagccaacccagacatatctgtcgcgcaagcccgtcagattctgcgggataccgcgcaagaagcaggatcgttcacacagtacggctatggaatcgtcgatgctcatgccgccgttgttgctgcatccggtggtagcggcggc

SEQ ID NO: 286 - protein, 413 aa, synthetic construct
  REGION 1..413: note = Variant of serine peptidase from Bacillus sinesaloumensis
MADQASQANGNQDVIEGELIVSVEPKNGKPDVSIQSAQSVTGQEDVLKSKGFTIVDTLHVEDSSVKPLVSKNFNKKVVEKMGLVYLVQYSPDQFKSSNIAKKELRKELMDLGFKVRYISENYKMMAIEGTATLQAVHPNQNWHYNMIKAPEAWAITSGSSSVKVAVLDTGIDHNHPSLANFVNTNLGRSFVGGNTMDVQGHGTHVAGTIASYGSVSGVMQSATLIPVKVLDNSGSGSLYGITQGILYAADIDADVINMSLGGGGYNQSMDEAVQTAVAQGTIVVAATGNDGASSISYPAAYSSVIAVGSVTSNRTRSSFSNYGWGLEVMAPGSNIYSTYPNSRYTSLSGTSMATPHVAGVAGLIRAANPDISVAQARQILRDTAQEAGSFTQYGYGIVDAHAAVVAASGGSGG

SEQ ID NO: 287 - DNA, 1239 bp, synthetic construct
  misc_feature 1..1239: note = Variant of serine peptidase from Bacillus sinesaloumensis
  source 1..1239: mol_type = other DNA
atggcagatcaagctagtcaagctaatggaaaccaggacgtcattgaaggcgagctgatcgtttcagtggaaccgaagaacggtaaacctgatgtgagcattcaaagtgcacaatccgtaacagggcaggaagacgtccttaaatcgaaaggctttacgatcgttgataccttgcatgtagaggatagcagcgtcaagccactcgtctcgaagaatttcaataagaaagtggtggagaagatgggactggtgtatcttgttcaatactctccggaccagtttaaaagttccaacattgcgaagaaagaactcagaaaagaattgatggatctgggctttaaagtccgctatataagcgaaaattacaagatgatggcgatcgaaggtacagccactcttcaggcagtacaccctaaccaaaactggcattataatatgattaaagctccggaagcgtgggctattacgtctggatcctctagcgttaaagtagcagtcctggatacagggatcgaccataatcacccatccttggccaacttcgtgaatactaatcttggccggtcgtttgttggaggaaacaccatggatgttcaaggtcatggcacacatgttgctggcacgattgcatcttatgggagtgtaagcggagtgatgcagagtgcgacactgatcccggtcaaagtgctcgataattctggcagcgggtccctttacggtattacgcaaggcatattgtatgccgccgacatcgatgcggacgtcattaacatgtctctgggtggaggaggctataatcagagcatggatgaggctgttcaaacagcagttgctcagggaaccattgtagtagcagcgactggcaatgatggtgcatcgtcgatcagttatcctgctgcctacagcagcgtcattgcggtgggatctgtgacgtccaatcgtacacgatcctcgttttctaactatggatctgggcttgaagttatggcaccgggcagcaacatctacagtacgtatcctaattccagatatacatctttgagtggtacaagcatggctactccgcacgttgcgggcgtagctgggctcattcgcgcagccaacccagagatatctgtcgcgcaagcccgtcagattctgcgggataccgcgcaagaagcaggatcgttcacacagtacggctatggaatcgtcgatgctcatgccgccgttgttgctgcatccggtggtagcggcggc

SEQ ID NO: 288 - protein, 413 aa, synthetic construct
  REGION 1..413: note = Variant of serine peptidase from Bacillus sinesaloumensis
MADQASQANGNQDVIEGELIVSVEPKNGKPDVSIQSAQSVTGQEDVLKSKGFTIVDTLHVEDSSVKPLVSKNFNKKVVEKMGLVYLVQYSPDQFKSSNIAKKELRKELMDLGFKVRYISENYKMMAIEGTATLQAVHPNQNWHYNMIKAPEAWAITSGSSSVKVAVLDTGIDHNHPSLANFVNTNLGRSFVGGNTMDVQGHGTHVAGTIASYGSVSGVMQSATLIPVKVLDNSGSGSLYGITQGILYAADIDADVINMSLGGGGYNQSMDEAVQTAVAQGTIVVAATGNDGASSISYPAAYSSVIAVGSVTSNRTRSSFSNYGSGLEVMAPGSNIYSTYPNSRYTSLSGTSMATPHVAGVAGLIRAANPEISVAQARQILRDTAQEAGSFTQYGYGIVDAHAAVVAASGGSGG

SEQ ID NO: 289 - DNA, 1239 bp, synthetic construct
  misc_feature 1..1239: note = Variant of serine peptidase from Bacillus sinesaloumensis
  source 1..1239: mol_type = other DNA
atggcagatcaagctagtcaagctaatggaaaccaggacgtcattgaaggcgagctgatcgtttcagtggaaccgaagaacggtaaacctgatgtgagcattcaaagtgcacaatccgtaacagggcaggaagacgtccttaaatcgaaaggctttacgatcgttgataccttgcatgtagaggatagcagcgtcaagccactcgtctcgaagaatttcaataagaaagtggtggagaagatgggactggtgtatcttgttcaatactctccggaccagtttaaaagttccaacattgcgaagaaagaactcagaaaagaattgatggatctgggctttaaagtccgctatataagcgaaaattacaagatgatggcgatcgaaggtacagccactcttcaggcagtacaccctaaccaaaactggcattataatatgattaaagctccggaagcgtgggctattacgtctggatcctctagcgttaaagtagcagtcctggatacagggatcgaccataatcacccatccttggccaacttcgtgaatcgtaatcttggccggtcgtttgttggaggaaacaccatggatgttcaaggtcatggcacacatgttgctggcacgattgcatcttatgggagtgtaagcggagtgatgcagagtgcgacactgatcccggtcaaagtgctcgataattctggcagcgggtccctttacggtattacgcaaggcatattgtatgccgccgacatcgatgcggacgtcattaacatgtctctgggtggaggaggctataatcagagcatggatgaggctgttcaaacagcagttgctcagggaaccattgtagtagcagcgactggcaatgatggtgcatcgtcgatcagttatcctgctgcctacagcagcgtcattgcggtgggatctgtgacgtccaatcgtacacgatcctcgttttctaactatggatctgggcttgaagttatggcaccgggcagcaacatctacagtacgtatcctaattccagatatacatctttgagtggtacaagcatggctactccgcacgttgcgggcgtagctgggctcattcgcgcagccaacccagacatatctgtcgcgcaagcccgtcagattctgcgggataccgcgcaagaagcaggatcgttcacacagtacggctatggaatcgtcgatgctcatgccgccgttgttgctgcatccggtggtagcggcggc

SEQ ID NO: 290 - protein, 413 aa, synthetic construct
  REGION 1..413: note = Variant of serine peptidase from Bacillus sinesaloumensis
MADQASQANGNQDVIEGELIVSVEPKNGKPDVSIQSAQSVTGQEDVLKSKGFTIVDTLHVEDSSVKPLVSKNFNKKVVEKMGLVYLVQYSPDQFKSSNIAKKELRKELMDLGFKVRYISENYKMMAIEGTATLQAVHPNQNWHYNMIKAPEAWAITSGSSSVKVAVLDTGIDHNHPSLANFVNRNLGRSFVGGNTMDVQGHGTHVAGTIASYGSVSGVMQSATLIPVKVLDNSGSGSLYGITQGILYAADIDADVINMSLGGGGYNQSMDEAVQTAVAQGTIVVAATGNDGASSISYPAAYSSVIAVGSVTSNRTRSSFSNYGSGLEVMAPGSNIYSTYPNSRYTSLSGTSMATPHVAGVAGLIRAANPDISVAQARQILRDTAQEAGSFTQYGYGIVDAHAAVVAASGGSGG

SEQ ID NO: 291 - DNA, 1239 bp, synthetic construct
  misc_feature 1..1239: note = Variant of serine peptidase from Bacillus sinesaloumensis
  source 1..1239: mol_type = other DNA
atggcagatcaagctagtcaagctaatggaaaccaggacgtcattgaaggcgagctgatcgtttcagtggaaccgaagaacggtaaacctgatgtgagcattcaaagtgcacaatccgtaacagggcaggaagacgtccttaaatcgaaaggctttacgatcgttgataccttgcatgtagaggatagcagcgtcaagccactcgtctcgaagaatttcaataagaaagtggtggagaagatgggactggtgtatcttgttcaatactctccggaccagtttaaaagttccaacattgcgaagaaagaactcagaaaagaattgatggatctgggctttaaagtccgctatataagcgaaaattacaagatgatggcgatcgaaggtacagccactcttgcggcagtacaccctaaccaaaactggcattataatatgattaaagctccggaagcgtgggctattacgtctggatcctctagcgttaaagtagcagtcctggatacagggatcgaccataatcacccatccttggccaacttcgtgaatactaatcttggccggtcgtttgttggaggaaacaccatggatgttcaaggtcatggcacacatgttgctggcacgattgcatcttatgggagtgtaagcggagtgatgcagagtgcgacactgatcccggtcaaagtgctcgataattctggcagcgggtccctttacggtattacgcaaggcatattgtatgccgccgacatcgatgcggacgtcattaacatgtctctgggtggaggaggctataatcagagcatggatgaggctgttcaaacagcagttgctcagggaaccattgtagtagcagcgactggcaatgatggtgcatcgtcgatcagttatcctgctgcctacagcagcgtcattgcggtgggatctgtgacgtccaatcgtacacgatcctcgttttctaactatggatctgggcttgaagttatggcaccgggcagcaacatctacagtacgtatcctaattccagatatacatctttgagtggtacaagcatggctactccgcacgttgcgggcgtagctgggctcattcgcgcagccaacccagacatatctgtcgcgcaagcccgtcagattctgcgggataccgcgcaagaagcaggatcgttcacacagtacggctatggaatcgtcgatgctcatgccgccgttgttgctgcatccggtggtagcggcggc

SEQ ID NO: 292 - protein, 413 aa, synthetic construct
  REGION 1..413: note = Variant of serine peptidase from Bacillus sinesaloumensis
MADQASQANGNQDVIEGELIVSVEPKNGKPDVSIQSAQSVTGQEDVLKSKGFTIVDTLHVEDSSVKPLVSKNFNKKVVEKMGLVYLVQYSPDQFKSSNIAKKELRKELMDLGFKVRYISENYKMMAIEGTATLAAVHPNQNWHYNMIKAPEAWAITSGSSSVKVAVLDTGIDHNHPSLANFVNTNLGRSFVGGNTMDVQGHGTHVAGTIASYGSVSGVMQSATLIPVKVLDNSGSGSLYGITQGILYAADIDADVINMSLGGGGYNQSMDEAVQTAVAQGTIVVAATGNDGASSISYPAAYSSVIAVGSVTSNRTRSSFSNYGSGLEVMAPGSNIYSTYPNSRYTSLSGTSMATPHVAGVAGLIRAANPDISVAQARQILRDTAQEAGSFTQYGYGIVDAHAAVVAASGGSGG

SEQ ID NO: 293 - DNA, 1239 bp, synthetic construct
  misc_feature 1..1239: note = Variant of serine peptidase from Bacillus sinesaloumensis
  source 1..1239: mol_type = other DNA
atggcagatcaagctagtcaagctaatggaaaccaggacgtcattgaaggcgagctgatcgtttcagtggaaccgaagaacggtaaacctgatgtgagcattcaaagtgcacaatccgtaacagggcaggaagacgtccttaaatcgaaaggctttacgatcgttgataccttgcatgtagaggatagcagcgtcaagccactcgtctcgaagaatttcaataagaaagtggtggagaagatgggactggtgtatcttgttcaatactctccggaccagtttaaaagttccaacattgcgaagaaagaactcagaaaagaattgatggatctgggctttaaagtccgctatataagcgaaaattacaagatgatggcgatcgaaggtacagccactcttcaggcagtacaccctaaccaaaactggcattataatatgattaaagctccggaagcgtgggctattacgtctggatcctctttggttaaagtagcagtcctggatacagggatcgaccataatcacccatccttggccaacttcgtgaatactaatcttggccggtcgtttgttggaggaaacaccatggatgttcaaggtcatggcacacatgttgctggcacgattgcatcttatgggagtgtaagcggagtgatgcagagtgcgacactgatcccggtcaaagtgctcgataattctggcagcgggtccctttacggtattacgcaaggcatattgtatgccgccgacatcgatgcggacgtcattaacatgtctctgggtggaggaggctataatcagagcatggatgaggctgttcaaacagcagttgctcagggaaccattgtagtagcagcgactggcaatgatggtgcatcgtcgatcagttatcctgctgcctacagcagcgtcattgcggtgggatctgtgacgtccaatcgtacacgatcctcgttttctaactatggatctgggcttgaagttatggcaccgggcagcaacatctacagtacgtatcctaattccagatatacatctttgagtggtacaagcatggctactccgcacgttgcgggcgtagctgggctcattcgcgcagccaacccagacatatctgtcgcgcaagcccgtcagattctgcgggataccgcgcaagaagcaggatcgttcacacagtacggctatggaatcgtcgatgctcatgccgccgttgttgctgcatccggtggtagcggcggc

SEQ ID NO: 294 - protein, 413 aa, synthetic construct
  REGION 1..413: note = Variant of serine peptidase from Bacillus sinesaloumensis
MADQASQANGNQDVIEGELIVSVEPKNGKPDVSIQSAQSVTGQEDVLKSKGFTIVDTLHVEDSSVKPLVSKNFNKKVVEKMGLVYLVQYSPDQFKSSNIAKKELRKELMDLGFKVRYISENYKMMAIEGTATLQAVHPNQNWHYNMIKAPEAWAITSGSSLVKVAVLDTGIDHNHPSLANFVNTNLGRSFVGGNTMDVQGHGTHVAGTIASYGSVSGVMQSATLIPVKVLDNSGSGSLYGITQGILYAADIDADVINMSLGGGGYNQSMDEAVQTAVAQGTIVVAATGNDGASSISYPAAYSSVIAVGSVTSNRTRSSFSNYGSGLEVMAPGSNIYSTYPNSRYTSLSGTSMATPHVAGVAGLIRAANPDISVAQARQILRDTAQEAGSFTQYGYGIVDAHAAVVAASGGSGG

SEQ ID NO: 295 - DNA, 1239 bp, synthetic construct
  misc_feature 1..1239: note = Variant of serine peptidase from Bacillus sinesaloumensis
  source 1..1239: mol_type = other DNA
atggcagatcaagctagtcaagctaatggaaaccaggacgtcattgaaggcgagctgatcgtttcagtggaaccgaagaacggtaaacctgatgtgagcattcaaagtgcacaatccgtaacagggcaggaagacgtccttaaatcgaaaggctttacgatcgttgataccttgcatgtagaggatagcagcgtcaagccactcgtctcgaagaatttcaataagaaagtggtggagaagatgggactggtgtatcttgttcaatactctccggaccagtttaaaagttccaacattgcgaagaaagaactcagaaaagaattgatggatctgggctttaaagtccgctatataagcgaaaattacaagatgatggcgatcgaaggtacagccactcttacggcagtacaccctaaccaaaactggcattataatatgattaaagctccggaagcgtgggctattacgtctggatcctctagcgttaaagtagcagtcctggatacagggatcgaccataatcacccatccttggccaacttcgtgaatactaatcttggccggtcgtttgttggaggaaacaccatggatgttcaaggtcatggcacacatgttgctggcacgattgcatcttatgggagtgtaagcggagtgatgcagagtgcgacactgatcccggtcaaagtgctcgataattctggcagcgggtccctttacggtattacgcaaggcatattgtatgccgccgacatcgatgcggacgtcattaacatgtctctgggtggaggaggctataatcagagcatggatgaggctgttcaaacagcagttgctcagggaaccattgtagtagcagcgactggcaatgatggtgcatcgtcgatcagttatcctgctgcctacagcagcgtcattgcggtgggatctgtgacgtccaatcgtacacgatcctcgttttctaactatggatctgggcttgaagttatggcaccgggcagcaacatctacagtacgtatcctaattccagatatacatctttgagtggtacaagcatggctactccgcacgttgcgggcgtagctgggctcattcgcgcagccaacccagacatatctgtcgcgcaagcccgtcagattctgcgggataccgcgcaagaagcaggatcgttcacacagtacggctatggaatcgtcgatgctcatgccgccgttgttgctgcatccggtggtagcggcggc

SEQ ID NO: 296 - protein, 413 aa, synthetic construct
  REGION 1..413: note = Variant of serine peptidase from Bacillus sinesaloumensis
MADQASQANGNQDVIEGELIVSVEPKNGKPDVSIQSAQSVTGQEDVLKSKGFTIVDTLHVEDSSVKPLVSKNFNKKVVEKMGLVYLVQYSPDQFKSSNIAKKELRKELMDLGFKVRYISENYKMMAIEGTATLTAVHPNQNWHYNMIKAPEAWAITSGSSSVKVAVLDTGIDHNHPSLANFVNTNLGRSFVGGNTMDVQGHGTHVAGTIASYGSVSGVMQSATLIPVKVLDNSGSGSLYGITQGILYAADIDADVINMSLGGGGYNQSMDEAVQTAVAQGTIVVAATGNDGASSISYPAAYSSVIAVGSVTSNRTRSSFSNYGSGLEVMAPGSNIYSTYPNSRYTSLSGTSMATPHVAGVAGLIRAANPDISVAQARQILRDTAQEAGSFTQYGYGIVDAHAAVVAASGGSGG

SEQ ID NO: 297 - DNA, 1239 bp, synthetic construct
  misc_feature 1..1239: note = Variant of serine peptidase from Bacillus sinesaloumensis
  source 1..1239: mol_type = other DNA
atggcagatcaagctagtcaagctaatggaaaccaggacgtcattgaaggcgagctgatcgtttcagtggaaccgaagaacggtaaacctgatgtgagcattcaaagtgcacaatccgtaacagggcaggaagacgtccttaaatcgaaaggctttacgatcgttgataccttgcatgtagaggatagcagcgtcaagccactcgtctcgaagaatttcaataagaaagtggtggagaagatgggactggtgtatcttgttcaatactctccggaccagtttaaaagttccaacattgcgaagaaagaactcagaaaagaattgatggatctgggctttaaagtccgctatataagcgaaaattacaagatgatggcgatcgaaggtacagccactcttcaggcagtacaccctaaccaaaactggcattataatatgattaaagctccggaagcgtgggctattacgtctggatcctctagcgttaaagtagcagtcctggatacagggatcgaccataatcacccatccttggccaacttcgtgaatactaatcttggccggtcgtttgttggaggaaacaccatggatgttcaaggtcatggcacacatgttgctggcacgattgcatcttatgggagtgtaagcggagtgatgcagagtgcgacactgatcccggtcaaagtgctcgataattctggcagcgggtccctttacggtattacgcaaggcatattgtatgccgccgacatcgatgcggacgtcattaacatgtctctgggtggaggaggctataatcagagcatggatgaggctgttcaaacagcagttgctcagggaaccattgtagtagcagcgactggcaatgatggtgcatcgtcgatcagttatcctgctgcctacagcagcgtcattgcggtgggatctgtgacgtccaatcgtacacgatcctcgttttctaactatggatctgggcttgaagttatggcaccgggcagcaacatctacagtacgtatcctaattccagatatacatctttgagtggtacaagcatggctactccgcacgttgcgggcgtagctgggctcattcgcgcagccaacccaggtatatctgtcgcgcaagcccgtcagattctgcgggataccgcgcaagaagcaggatcgttcacacagtacggctatggaatcgtcgatgctcatgccgccgttgttgctgcatccggtggtagcggcggc

SEQ ID NO: 298 - protein, 413 aa, synthetic construct
  REGION 1..413: note = Variant of serine peptidase from Bacillus sinesaloumensis
MADQASQANGNQDVIEGELIVSVEPKNGKPDVSIQSAQSVTGQEDVLKSKGFTIVDTLHVEDSSVKPLVSKNFNKKVVEKMGLVYLVQYSPDQFKSSNIAKKELRKELMDLGFKVRYISENYKMMAIEGTATLQAVHPNQNWHYNMIKAPEAWAITSGSSSVKVAVLDTGIDHNHPSLANFVNTNLGRSFVGGNTMDVQGHGTHVAGTIASYGSVSGVMQSATLIPVKVLDNSGSGSLYGITQGILYAADIDADVINMSLGGGGYNQSMDEAVQTAVAQGTIVVAATGNDGASSISYPAAYSSVIAVGSVTSNRTRSSFSNYGSGLEVMAPGSNIYSTYPNSRYTSLSGTSMATPHVAGVAGLIRAANPGISVAQARQILRDTAQEAGSFTQYGYGIVDAHAAVVAASGGSGG

SEQ ID NO: 299 - DNA, 1239 bp, synthetic construct
  misc_feature 1..1239: note = Variant of serine peptidase from Bacillus sinesaloumensis
  source 1..1239: mol_type = other DNA
atggcagatcaagctagtcaagctaatggaaaccaggacgtcattgaaggcgagctgatcgtttcagtggaaccgaagaacggtaaacctgatgtgagcattcaaagtgcacaatccgtaacagggcaggaagacgtccttaaatcgaaaggctttacgatcgttgataccttgcatgtagaggatagcagcgtcaagccactcgtctcgaagaatttcaataagaaagtggtggagaagatgggactggtgtatcttgttcaatactctccggaccagtttaaaagttccaacattgcgaagaaagaactcagaaaagaattgatggatctgggctttaaagtccgctatataagcgaaaattacaagatgatggcgatcgaaggtacagccactcttcaggcagtacaccctaaccaaaactggcattataatatgattaaagctccggaagcgtgggctattacgtctggatcctctagcgttaaagtagcagtcctggatacagggatcgaccataatcacccatccttggccaacttcgtgaatactaatcttggccggtcgtttgttggaggaaacaccatggatgttcaaggtcatggcacacatgttgctggcacgattgcatcttatgggagtgtaagcggagtgatgcagagtgcgacactgatcccggtcaaagtgctcgataattctggcagcgggtccctttacggtattacgcaaggcatattgtatgccgccgacatcgatgcggacgtcattaacatgtctctgggtggaggaggctataatcagagcatggatgaggctgttcaaacagcagttgctcagggaaccattgtagtagcagcgactggcaatgatggtgcatcgtcgatcagttatcctgctgcctacagcagcgtcattgcggtgggatctgtgacgtccaatcgtacacgatcctcgttttctaactatggatctgggcttgaagttatggcaccgggcagcaacatctacagtacgtatcctaattccagatatacatctttgagtggtacaagcatggctactccgcacgttgcgggcgtagctgggctcattcgcgcagccaacccagacatatctgtcgcggcggcccgtcagattctgcgggataccgcgcaagaagcaggatcgttcacacagtacggctatggaatcgtcgatgctcatgccgccgttgttgctgcatccggtggtagcggcggc

SEQ ID NO: 300 - protein, 413 aa, synthetic construct
  REGION 1..413: note = Variant of serine peptidase from Bacillus sinesaloumensis
MADQASQANGNQDVIEGELIVSVEPKNGKPDVSIQSAQSVTGQEDVLKSKGFTIVDTLHVEDSSVKPLVSKNFNKKVVEKMGLVYLVQYSPDQFKSSNIAKKELRKELMDLGFKVRYISENYKMMAIEGTATLQAVHPNQNWHYNMIKAPEAWAITSGSSSVKVAVLDTGIDHNHPSLANFVNTNLGRSFVGGNTMDVQGHGTHVAGTIASYGSVSGVMQSATLIPVKVLDNSGSGSLYGITQGILYAADIDADVINMSLGGGGYNQSMDEAVQTAVAQGTIVVAATGNDGASSISYPAAYSSVIAVGSVTSNRTRSSFSNYGSGLEVMAPGSNIYSTYPNSRYTSLSGTSMATPHVAGVAGLIRAANPDISVAAARQILRDTAQEAGSFTQYGYGIVDAHAAVVAASGGSGG

SEQ ID NO: 301 - DNA, 1239 bp, synthetic construct
  misc_feature 1..1239: note = Variant of serine peptidase from Bacillus sinesaloumensis
  source 1..1239: mol_type = other DNA
atggcagatcaagctagtcaagctaatggaaaccaggacgtcattgaaggcgagctgatcgtttcagtggaaccgaagaacggtaaacctgatgtgagcattcaaagtgcacaatccgtaacagggcaggaagacgtccttaaatcgaaaggctttacgatcgttgataccttgcatgtagaggatagcagcgtcaagccactcgtctcgaagaatttcaataagaaagtggtggagaagatgggactggtgtatcttgttcaatactctccggaccagtttaaaagttccaacattgcgaagaaagaactcagaaaagaattgatggatctgggctttaaagtccgctatataagcgaaaattacaagatgatggcgatcgggggtacagccactcttcaggcagtacaccctaaccaaaactggcattataatatgattaaagctccggaagcgtgggctattacgtctggatcctctagcgttaaagtagcagtcctggatacagggatcgaccataatcacccatccttggccaacttcgtgaatactaatcttggccggtcgtttgttggaggaaacaccatggatgttcaaggtcatggcacacatgttgctggcacgattgcatcttatgggagtgtaagcggagtgatgcagagtgcgacactgatcccggtcaaagtgctcgataattctggcagcgggtccctttacggtattacgcaaggcatattgtatgccgccgacatcgatgcggacgtcattaacatgtctctgggtggaggaggctataatcagagcatggatgaggctgttcaaacagcagttgctcagggaaccattgtagtagcagcgactggcaatgatggtgcatcgtcgatcagttatcctgctgcctacagcagcgtcattgcggtgggatctgtgacgtccaatcgtacacgatcctcgttttctaactatggatctgggcttgaagttatggcaccgggcagcaacatctacagtacgtatcctaattccagatatacatctttgagtggtacaagcatggctactccgcacgttgcgggcgtagctgggctcattcgcgcagccaacccagacatatctgtcgcgcaagcccgtcagattctgcgggataccgcgcaagaagcaggatcgttcacacagtacggctatggaatcgtcgatgctcatgccgccgttgttgctgcatccggtggtagcggcggc

SEQ ID NO: 302 - protein, 413 aa, synthetic construct
  REGION 1..413: note = Variant of serine peptidase from Bacillus sinesaloumensis
MADQASQANGNQDVIEGELIVSVEPKNGKPDVSIQSAQSVTGQEDVLKSKGFTIVDTLHVEDSSVKPLVSKNFNKKVVEKMGLVYLVQYSPDQFKSSNIAKKELRKELMDLGFKVRYISENYKMMAIGGTATLQAVHPNQNWHYNMIKAPEAWAITSGSSSVKVAVLDTGIDHNHPSLANFVNTNLGRSFVGGNTMDVQGHGTHVAGTIASYGSVSGVMQSATLIPVKVLDNSGSGSLYGITQGILYAADIDADVINMSLGGGGYNQSMDEAVQTAVAQGTIVVAATGNDGASSISYPAAYSSVIAVGSVTSNRTRSSFSNYGSGLEVMAPGSNIYSTYPNSRYTSLSGTSMATPHVAGVAGLIRAANPDISVAQARQILRDTAQEAGSFTQYGYGIVDAHAAVVAASGGSGG

SEQ ID NO: 303 - DNA, 1239 bp, synthetic construct
  misc_feature 1..1239: note = Variant of serine peptidase from Bacillus sinesaloumensis
  source 1..1239: mol_type = other DNA
atggcagatcaagctagtcaagctaatggaaaccaggacgtcattgaaggcgagctgatcgtttcagtggaaccgaagaacggtaaacctgatgtgagcattcaaagtgcacaatccgtaacagggcaggaagacgtccttaaatcgaaaggctttacgatcgttgataccttgcatgtagaggatagcagcgtcaagccactcgtctcgaagaatttcaataagaaagtggtggagaagatgggactggtgtatcttgttcaatactctccggaccagtttaaaagttccaacattgcgaagaaagaactcagaaaagaattgatggatctgggctttaaagtccgctatataagcgaaaattacaagatgatggcgatcgaaggtgtggccactcttcaggcagtacaccctaaccaaaactggcattataatatgattaaagctccggaagcgtgggctattacgtctggatcctctagcgttaaagtagcagtcctggatacagggatcgaccataatcacccatccttggccaacttcgtgaatactaatcttggccggtcgtttgttggaggaaacaccatggatgttcaaggtcatggcacacatgttgctggcacgattgcatcttatgggagtgtaagcggagtgatgcagagtgcgacactgatcccggtcaaagtgctcgataattctggcagcgggtccctttacggtattacgcaaggcatattgtatgccgccgacatcgatgcggacgtcattaacatgtctctgggtggaggaggctataatcagagcatggatgaggctgttcaaacagcagttgctcagggaaccattgtagtagcagcgactggcaatgatggtgcatcgtcgatcagttatcctgctgcctacagcagcgtcattgcggtgggatctgtgacgtccaatcgtacacgatcctcgttttctaactatggatctgggcttgaagttatggcaccgggcagcaacatctacagtacgtatcctaattccagatatacatctttgagtggtacaagcatggctactccgcacgttgcgggcgtagctgggctcattcgcgcagccaacccagacatatctgtcgcgcaagcccgtcagattctgcgggataccgcgcaagaagcaggatcgttcacacagtacggctatggaatcgtcgatgctcatgccgccgttgttgctgcatccggtggtagcggcggc

SEQ ID NO: 304 - protein, 413 aa, synthetic construct
  REGION 1..413: note = Variant of serine peptidase from Bacillus sinesaloumensis
MADQASQANGNQDVIEGELIVSVEPKNGKPDVSIQSAQSVTGQEDVLKSKGFTIVDTLHVEDSSVKPLVSKNFNKKVVEKMGLVYLVQYSPDQFKSSNIAKKELRKELMDLGFKVRYISENYKMMAIEGVATLQAVHPNQNWHYNMIKAPEAWAITSGSSSVKVAVLDTGIDHNHPSLANFVNTNLGRSFVGGNTMDVQGHGTHVAGTIASYGSVSGVMQSATLIPVKVLDNSGSGSLYGITQGILYAADIDADVINMSLGGGGYNQSMDEAVQTAVAQGTIVVAATGNDGASSISYPAAYSSVIAVGSVTSNRTRSSFSNYGSGLEVMAPGSNIYSTYPNSRYTSLSGTSMATPHVAGVAGLIRAANPDISVAQARQILRDTAQEAGSFTQYGYGIVDAHAAVVAASGGSGG

SEQ ID NO: 305 - DNA, 1239 bp, synthetic construct
  misc_feature 1..1239: note = Variant of serine peptidase from Bacillus sinesaloumensis
  source 1..1239: mol_type = other DNA
atggcagatcaagctagtcaagctaatggaaaccaggacgtcattgaaggcgagctgatcgtttcagtggaaccgaagaacggtaaacctgatgtgagcattcaaagtgcacaatccgtaacagggcaggaagacgtccttaaatcgaaaggctttacgatcgttgataccttgcatgtagaggatagcagcgtcaagccactcgtctcgaagaatttcaataagaaagtggtggagaagatgggactggtgtatcttgttcaatactctccggaccagtttaaaagttccaacattgcgaagaaagaactcagaaaagaattgatggatctgggctttaaagtccgctatataagcgaaaattacaagatgatggcgatcgaaggtacagccactcttaatgcagtacaccctaaccaaaactggcattataatatgattaaagctccggaagcgtgggctattacgtctggatcctctagcgttaaagtagcagtcctggatacagggatcgaccataatcacccatccttggccaacttcgtgaatactaatcttggccggtcgtttgttggaggaaacaccatggatgttcaaggtcatggcacacatgttgctggcacgattgcatcttatgggagtgtaagcggagtgatgcagagtgcgacactgatcccggtcaaagtgctcgataattctggcagcgggtccctttacggtattacgcaaggcatattgtatgccgccgacatcgatgcggacgtcattaacatgtctctgggtggaggaggctataatcagagcatggatgaggctgttcaaacagcagttgctcagggaaccattgtagtagcagcgactggcaatgatggtgcatcgtcgatcagttatcctgctgcctacagcagcgtcattgcggtgggatctgtgacgtccaatcgtacacgatcctcgttttctaactatggatctgggcttgaagttatggcaccgggcagcaacatctacagtacgtatcctaattccagatatacatctttgagtggtacaagcatggctactccgcacgttgcgggcgtagctgggctcattcgcgcagccaacccagacatatctgtcgcgcaagcccgtcagattctgcgggataccgcgcaagaagcaggatcgttcacacagtacggctatggaatcgtcgatgctcatgccgccgttgttgctgcatccggtggtagcggcggc

SEQ ID NO: 306 - protein, 413 aa, synthetic construct
  REGION 1..413: note = Variant of serine peptidase from Bacillus sinesaloumensis
MADQASQANGNQDVIEGELIVSVEPKNGKPDVSIQSAQSVTGQEDVLKSKGFTIVDTLHVEDSSVKPLVSKNFNKKVVEKMGLVYLVQYSPDQFKSSNIAKKELRKELMDLGFKVRYISENYKMMAIEGTATLNAVHPNQNWHYNMIKAPEAWAITSGSSSVKVAVLDTGIDHNHPSLANFVNTNLGRSFVGGNTMDVQGHGTHVAGTIASYGSVSGVMQSATLIPVKVLDNSGSGSLYGITQGILYAADIDADVINMSLGGGGYNQSMDEAVQTAVAQGTIVVAATGNDGASSISYPAAYSSVIAVGSVTSNRTRSSFSNYGSGLEVMAPGSNIYSTYPNSRYTSLSGTSMATPHVAGVAGLIRAANPDISVAQARQILRDTAQEAGSFTQYGYGIVDAHAAVVAASGGSGG

SEQ ID NO: 307 - DNA, 1239 bp, synthetic construct
  misc_feature 1..1239: note = Variant of serine peptidase from Bacillus sinesaloumensis
  source 1..1239: mol_type = other DNA
atggcagatcaagctagtcaagctaatggaaaccaggacgtcattgaaggcgagctgatcgtttcagtggaaccgaagaacggtaaacctgatgtgagcattcaaagtgcacaatccgtaacagggcaggaagacgtccttaaatcgaaaggctttacgatcgttgataccttgcatgtagaggatagcagcgtcaagccactcgtctcgaagaatttcaataagaaagtggtggagaagatgggactggtgtatcttgttcaatactctccggaccagtttaaaagttccaacattgcgaagaaagaactcagaaaagaattgatggatctgggctttaaagtccgctatataagcgaaaattacaagatgatggcgatcgaaggtacagccactcttcaggcagtacaccctaaccaaaactggcattataatatgattaaagctccggaagcgtgggctattacgtctggatcctctagcgttaaagtagcagtcctggatacagggatcgaccataatcacccatccttggccaacttcgtgaatactaatcttggccggtcgtttgttggaggaaacaccatggatgttcaaggtcatggcacacatgttgctggcacgattgcatcttatgggagtgtaagcggagtgatgcagagtgcgacactgatcccggtcaaagtgctcgataattctggcagcgggtccctttacggtattacgcaaggcatattgtatgccgccgacatcgatgcggacgtcattaacatgtctctgggtggaggaggctataatcagagcatggatgaggctgttcaaacagcagttgctcagggaaccattgtagtagcagcgactggcaatgatggtgcatcgtcgatcagttatcctgctgcctacagcagcgtcattgcggtgggatctgtgacgtccaatcgtacacgatcctcgttttctaactatggatctgggcttgaagttatggcaccgggcagcaacatctacagtacgtatcctggttccagatatacatctttgagtggtacaagcatggctactccgcacgttgcgggcgtagctgggctcattcgcgcagccaacccagacatatctgtcgcgcaagcccgtcagattctgcgggataccgcgcaagaagcaggatcgttcacacagtacggctatggaatcgtcgatgctcatgccgccgttgttgctgcatccggtggtagcggcggc

SEQ ID NO: 308 - protein, 413 aa, synthetic construct
  REGION 1..413: note = Variant of serine peptidase from Bacillus sinesaloumensis
MADQASQANGNQDVIEGELIVSVEPKNGKPDVSIQSAQSVTGQEDVLKSKGFTIVDTLHVEDSSVKPLVSKNFNKKVVEKMGLVYLVQYSPDQFKSSNIAKKELRKELMDLGFKVRYISENYKMMAIEGTATLQAVHPNQNWHYNMIKAPEAWAITSGSSSVKVAVLDTGIDHNHPSLANFVNTNLGRSFVGGNTMDVQGHGTHVAGTIASYGSVSGVMQSATLIPVKVLDNSGSGSLYGITQGILYAADIDADVINMSLGGGGYNQSMDEAVQTAVAQGTIVVAATGNDGASSISYPAAYSSVIAVGSVTSNRTRSSFSNYGSGLEVMAPGSNIYSTYPGSRYTSLSGTSMATPHVAGVAGLIRAANPDISVAQARQILRDTAQEAGSFTQYGYGIVDAHAAVVAASGGSGG

SEQ ID NO: 309 - DNA, 1239 bp, synthetic construct
  misc_feature 1..1239: note = Variant of serine peptidase from Bacillus sinesaloumensis
  source 1..1239: mol_type = other DNA
atggcagatcaagctagtcaagctaatggaaaccaggacgtcattgaaggcgagctgatcgtttcagtggaaccgaagaacggtaaacctgatgtgagcattcaaagtgcacaatccgtaacagggcaggaagacgtccttaaatcgaaaggctttacgatcgttgataccttgcatgtagaggatagcagcgtcaagccactcgtctcgaagaatttcaataagaaagtggtggagaagatgggactggtgtatcttgttcaatactctccggaccagtttaaaagttccaacattgcgaagaaagaactcagaaaagaattgatggatctgggctttaaagtccgctatataagcgaaaattacaagatgatggcgatcgaaggtacagccactcttcaggcagtacaccctaaccaaaactggcattataatatgattaaagctccggaagcgtgggctattacgtctggatcctctagcgttaaagtagcagtcctggatacagggatcgaccataatcacccatccttggccaacttcgtgaatactaatcttggccggtcgagtgttggaggaaacaccatggatgttcaaggtcatggcacacatgttgctggcacgattgcatcttatgggagtgtaagcggagtgatgcagagtgcgacactgatcccggtcaaagtgctcgataattctggcagcgggtccctttacggtattacgcaaggcatattgtatgccgccgacatcgatgcggacgtcattaacatgtctctgggtggaggaggctataatcagagcatggatgaggctgttcaaacagcagttgctcagggaaccattgtagtagcagcgactggcaatgatggtgcatcgtcgatcagttatcctgctgcctacagcagcgtcattgcggtgggatctgtgacgtccaatcgtacacgatcctcgttttctaactatggatctgggcttgaagttatggcaccgggcagcaacatctacagtacgtatcctaattccagatatacatctttgagtggtacaagcatggctactccgcacgttgcgggcgtagctgggctcattcgcgcagccaacccagacatatctgtcgcgcaagcccgtcagattctgcgggataccgcgcaagaagcaggatcgttcacacagtacggctatggaatcgtcgatgctcatgccgccgttgttgctgcatccggtggtagcggcggc

SEQ ID NO: 310 - protein, 413 aa, synthetic construct
  REGION 1..413: note = Variant of serine peptidase from Bacillus sinesaloumensis
MADQASQANGNQDVIEGELIVSVEPKNGKPDVSIQSAQSVTGQEDVLKSKGFTIVDTLHVEDSSVKPLVSKNFNKKVVEKMGLVYLVQYSPDQFKSSNIAKKELRKELMDLGFKVRYISENYKMMAIEGTATLQAVHPNQNWHYNMIKAPEAWAITSGSSSVKVAVLDTGIDHNHPSLANFVNTNLGRSSVGGNTMDVQGHGTHVAGTIASYGSVSGVMQSATLIPVKVLDNSGSGSLYGITQGILYAADIDADVINMSLGGGGYNQSMDEAVQTAVAQGTIVVAATGNDGASSISYPAAYSSVIAVGSVTSNRTRSSFSNYGSGLEVMAPGSNIYSTYPNSRYTSLSGTSMATPHVAGVAGLIRAANPDISVAQARQILRDTAQEAGSFTQYGYGIVDAHAAVVAASGGSGG

SEQ ID NO: 311 - DNA, 1239 bp, synthetic construct
  misc_feature 1..1239: note = Variant of serine peptidase from Bacillus sinesaloumensis
  source 1..1239: mol_type = other DNA
atggcagatcaagctagtcaagctaatggaaaccaggacgtcattgaaggcgagctgatcgtttcagtggaaccgaagaacggtaaacctgatgtgagcattcaaagtgcacaatccgtaacagggcaggaagacgtccttaaatcgaaaggctttacgatcgttgataccttgcatgtagaggatagcagcgtcaagccactcgtctcgaagaatttcaataagaaagtggtggagaagatgggactggtgtatcttgttcaatactctccggaccagtttaaaagttccaacattgcgaagaaagaactcagaaaagaattgatggatctgggctttaaagtccgctatataagcgaaaattacaagatgatggcgatcgaaggtacagccactcttcaggcagtacaccctaaccaaaactggcattataatatgattaaagctccggaagcgtgggctattacgtctggatcctctagcgttaaagtagcagtcctggatacagggatcgaccataatcacccatccttggccaacttcgtgaatactaatcttggccggtcgtttgttggaggaaacaccatggatgttcaaggtcatggcacacatgttgctggcacgattgcatcttatgggagtgtaagcggagtgatgcagagtgcgacactgatcccggtcaaagtgctcgataattctggcagcgggtccctttacggtattacgcaaggcatattgtatgccgccgacatcgatgcggacgtcattaacatgtctctgggtggaggaggctataatcagagcatggatgaggctgttcaaacagcagttgctcagggaaccattgtagtagcagcgactggcaatgatggtgcatcgtcgatcagttatcctgctgcctacagcagcgtcattgcggtgggatctgtgacgtccaatcgtacacgatcctcgttttctaactatggatctgggcttgaagttatggcaccgggcagcaacatctacagtacgtatcctaattccagatatacatctttgagtggtacaagcatggctactccgcacgttgcgggcgtagctgggctcattcgcgcagccaacccacctatatctgtcgcgcaagcccgtcagattctgcgggataccgcgcaagaagcaggatcgttcacacagtacggctatggaatcgtcgatgctcatgccgccgttgttgctgcatccggtggtagcggcggc

SEQ ID NO: 312 - protein, 413 aa, synthetic construct
  REGION 1..413: note = Variant of serine peptidase from Bacillus sinesaloumensis
MADQASQANGNQDVIEGELIVSVEPKNGKPDVSIQSAQSVTGQEDVLKSKGFTIVDTLHVEDSSVKPLVSKNFNKKVVEKMGLVYLVQYSPDQFKSSNIAKKELRKELMDLGFKVRYISENYKMMAIEGTATLQAVHPNQNWHYNMIKAPEAWAITSGSSSVKVAVLDTGIDHNHPSLANFVNTNLGRSFVGGNTMDVQGHGTHVAGTIASYGSVSGVMQSATLIPVKVLDNSGSGSLYGITQGILYAADIDADVINMSLGGGGYNQSMDEAVQTAVAQGTIVVAATGNDGASSISYPAAYSSVIAVGSVTSNRTRSSFSNYGSGLEVMAPGSNIYSTYPNSRYTSLSGTSMATPHVAGVAGLIRAANPPISVAQARQILRDTAQEAGSFTQYGYGIVDAHAAVVAASGGSGG

SEQ ID NO: 313 - DNA, 1239 bp, synthetic construct
  misc_feature 1..1239: note = Variant of serine peptidase from Bacillus sinesaloumensis
  source 1..1239: mol_type = other DNA
atggcagatcaagctagtcaagctaatggaaaccaggacgtcattgaaggcgagctgatcgtttcagtggaaccgaagaacggtaaacctgatgtgagcattcaaagtgcacaatccgtaacagggcaggaagacgtccttaaatcgaaaggctttacgatcgttgataccttgcatgtagaggatagcagcgtcaagccactcgtctcgaagaatttcaataagaaagtggtggagaagatgggactggtgtatcttgttcaatactctccggaccagtttaaaagttccaacattgcgaagaaagaactcagaaaagaattgatggatctgggctttaaagtccgctatataagcgaaaattacaagatgatggcgatcgaaggtacagccactcttcaggcagtacaccctaaccaaaactggcattataggatgattaaagctccggaagcgtgggctattacgtctggatcctctagcgttaaagtagcagtcctggatacagggatcgaccataatcacccatccttggccaacttcgtgaatactaatcttggccggtcgtttgttggaggaaacaccatggatgttcaaggtcatggcacacatgttgctggcacgattgcatcttatgggagtgtaagcggagtgatgcagagtgcgacactgatcccggtcaaagtgctcgataattctggcagcgggtccctttacggtattacgcaaggcatattgtatgccgccgacatcgatgcggacgtcattaacatgtctctgggtggaggaggctataatcagagcatggatgaggctgttcaaacagcagttgctcagggaaccattgtagtagcagcgactggcaatgatggtgcatcgtcgatcagttatcctgctgcctacagcagcgtcattgcggtgggatctgtgacgtccaatcgtacacgatcctcgttttctaactatggatctgggcttgaagttatggcaccgggcagcaacatctacagtacgtatcctaattccagatatacatctttgagtggtacaagcatggctactccgcacgttgcgggcgtagctgggctcattcgcgcagccaacccagacatatctgtcgcgcaagcccgtcagattctgcgggataccgcgcaagaagcaggatcgttcacacagtacggctatggaatcgtcgatgctcatgccgccgttgttgctgcatccggtggtagcggcggc

SEQ ID NO: 314 - protein, 413 aa, synthetic construct
  REGION 1..413: note = Variant of serine peptidase from Bacillus sinesaloumensis
MADQASQANGNQDVIEGELIVSVEPKNGKPDVSIQSAQSVTGQEDVLKSKGFTIVDTLHVEDSSVKPLVSKNFNKKVVEKMGLVYLVQYSPDQFKSSNIAKKELRKELMDLGFKVRYISENYKMMAIEGTATLQAVHPNQNWHYRMIKAPEAWAITSGSSSVKVAVLDTGIDHNHPSLANFVNTNLGRSFVGGNTMDVQGHGTHVAGTIASYGSVSGVMQSATLIPVKVLDNSGSGSLYGITQGILYAADIDADVINMSLGGGGYNQSMDEAVQTAVAQGTIVVAATGNDGASSISYPAAYSSVIAVGSVTSNRTRSSFSNYGSGLEVMAPGSNIYSTYPNSRYTSLSGTSMATPHVAGVAGLIRAANPDISVAQARQILRDTAQEAGSFTQYGYGIVDAHAAVVAASGGSGG

SEQ ID NO: 315 - DNA, 1239 bp, synthetic construct
  misc_feature 1..1239: note = Variant of serine peptidase from Bacillus sinesaloumensis
  source 1..1239: mol_type = other DNA
atggcagatcaagctagtcaagctaatggaaaccaggacgtcattgaaggcgagctgatcgtttcagtggaaccgaagaacggtaaacctgatgtgagcattcaaagtgcacaatccgtaacagggcaggaagacgtccttaaatcgaaaggctttacgatcgttgataccttgcatgtagaggatagcagcgtcaagccactcgtctcgaagaatttcaataagaaagtggtggagaagatgggactggtgtatcttgttcaatactctccggaccagtttaaaagttccaacattgcgaagaaagaactcagaaaagaattgatggatctgggctttaaagtccgctatataagcgaaaattacaagatgatggcgatcgaaggtacagccactcttcaggcagtacaccctaaccaaaactggcattataatatgattaaagctccggaagcgtgggctattacgtctggatcctctagcgttaaagtagcagtcctggatacagggatcgaccataatcacccatccttggccaacttcgtgaatactaatcttggccggtcgtttgttggaggaaacaccatggatgttcaaggtcatggcacacatgttgctggcacgattgcatcttatgggagtgtaagcggagtgatgcagagtgcgacactgatcccggtcaaagtgctcgataattctggcagcgggtccctttacggtattacgcaaggcatattgtatgccgccgacatcgatgcggacgtcattaacatgtctctgggtggaggaggctataatcagagcatggatgaggctgttcaaacagcagttgctcatggaaccattgtagtagcagcgactggcaatgatggtgcatcgtcgatcagttatcctgctgcctacagcagcgtcattgcggtgggatctgtgacgtccaatcgtacacgatcctcgttttctaactatggatctgggcttgaagttatggcaccgggcagcaacatctacagtacgtatcctaattccagatatacatctttgagtggtacaagcatggctactccgcacgttgcgggcgtagctgggctcattcgcgcagccaacccagacatatctgtcgcgcaagcccgtcagattctgcgggataccgcgcaagaagcaggatcgttcacacagtacggctatggaatcgtcgatgctcatgccgccgttgttgctgcatccggtggtagcggcggc

SEQ ID NO: 316 - protein, 413 aa, synthetic construct
  REGION 1..413: note = Variant of serine peptidase from Bacillus sinesaloumensis
MADQASQANGNQDVIEGELIVSVEPKNGKPDVSIQSAQSVTGQEDVLKSKGFTIVDTLHVEDSSVKPLVSKNFNKKVVEKMGLVYLVQYSPDQFKSSNIAKKELRKELMDLGFKVRYISENYKMMAIEGTATLQAVHPNQNWHYNMIKAPEAWAITSGSSSVKVAVLDTGIDHNHPSLANFVNTNLGRSFVGGNTMDVQGHGTHVAGTIASYGSVSGVMQSATLIPVKVLDNSGSGSLYGITQGILYAADIDADVINMSLGGGGYNQSMDEAVQTAVAHGTIVVAATGNDGASSISYPAAYSSVIAVGSVTSNRTRSSFSNYGSGLEVMAPGSNIYSTYPNSRYTSLSGTSMATPHVAGVAGLIRAANPDISVAQARQILRDTAQEAGSFTQYGYGIVDAHAAVVAASGGSGG

SEQ ID NO: 317 - DNA, 1239 bp, synthetic construct
  misc_feature 1..1239: note = Variant of serine peptidase from Bacillus sinesaloumensis
  source 1..1239: mol_type = other DNA
atggcagatcaagctagtcaagctaatggaaaccaggacgtcattgaaggcgagctgatcgtttcagtggaaccgaagaacggtaaacctgatgtgagcattcaaagtgcacaatccgtaacagggcaggaagacgtccttaaatcgaaaggctttacgatcgttgataccttgcatgtagaggatagcagcgtcaagccactcgtctcgaagaatttcaataagaaagtggtggagaagatgggactggtgtatcttgttcaatactctccggaccagtttaaaagttccaacattgcgaagaaagaactcagaaaagaattgatggatctgggctttaaagtccgctatataagcgaaaattacaagatgatggcgatcgaaggtacagccactcttcaggcagtacaccctaaccaaaactggcattataatatgattaaagctccggaagcgtgggctattacgtctggatcctctagcgttaaagtagcagtcctggatacagggatcgaccataatcacccatccttggccaacttcgtgaatactaatcttggccggtcgtttgttggaggaaacaccatggatgttcaaggtcatggcacacatgttgctggcacgattgcatcttatgggagtgtaagcggagtgatgcagagtgcgacactgatcccggtcaaagtgctcgataattctggcagcgggtccctttacggtattacgcaaggcatattgtatgccgccgacatcgatgcggacgtcattaacatgtctctgggtggaggaggctataatcagagcatggatgaggctgttcaaacagcagttgctagtggaaccattgtagtagcagcgactggcaatgatggtgcatcgtcgatcagttatcctgctgcctacagcagcgtcattgcggtgggatctgtgacgtccaatcgtacacgatcctcgttttctaactatggatctgggcttgaagttatggcaccgggcagcaacatctacagtacgtatcctaattccagatatacatctttgagtggtacaagcatggctactccgcacgttgcgggcgtagctgggctcattcgcgcagccaacccagacatatctgtcgcgcaagcccgtcagattctgcgggataccgcgcaagaagcaggatcgttcacacagtacggctatggaatcgtcgatgctcatgccgccgttgttgctgcatccggtggtagcggcggc

SEQ ID NO: 318 - protein, 413 aa, synthetic construct
  REGION 1..413: note = Variant of serine peptidase from Bacillus sinesaloumensis
MADQASQANGNQDVIEGELIVSVEPKNGKPDVSIQSAQSVTGQEDVLKSKGFTIVDTLHVEDSSVKPLVSKNFNKKVVEKMGLVYLVQYSPDQFKSSNIAKKELRKELMDLGFKVRYISENYKMMAIEGTATLQAVHPNQNWHYNMIKAPEAWAITSGSSSVKVAVLDTGIDHNHPSLANFVNTNLGRSFVGGNTMDVQGHGTHVAGTIASYGSVSGVMQSATLIPVKVLDNSGSGSLYGITQGILYAADIDADVINMSLGGGGYNQSMDEAVQTAVASGTIVVAATGNDGASSISYPAAYSSVIAVGSVTSNRTRSSFSNYGSGLEVMAPGSNIYSTYPNSRYTSLSGTSMATPHVAGVAGLIRAANPDISVAQARQILRDTAQEAGSFTQYGYGIVDAHAAVVAASGGSGG

SEQ ID NO: 319 - DNA, 1239 bp, synthetic construct
  misc_feature 1..1239: note = Variant of serine peptidase from Bacillus sinesaloumensis
  source 1..1239: mol_type = other DNA
atggcagatcaagctagtcaagctaatggaaaccaggacgtcattgaaggcgagctgatcgtttcagtggaaccgaagaacggtaaacctgatgtgagcattcaaagtgcacaatccgtaacagggcaggaagacgtccttaaatcgaaaggctttacgatcgttgataccttgcatgtagaggatagcagcgtcaagccactcgtctcgaagaatttcaataagaaagtggtggagaagatgggactggtgtatcttgttcaatactctccggaccagtttaaaagttccaacattgcgaagaaagaactcagaaaagaattgatggatctgggctttaaagtccgctatataagcgaaaattacaagatgatggcgatcgaaggtacagccactcttcaggcagtacaccctaaccaaaactggcattataatatgattaaagctccggaagcgtgggctattacgtctggatcccagagcgttaaagtagcagtcctggatacagggatcgaccataatcacccatccttggccaacttcgtgaatactaatcttggccggtcgtttgttggaggaaacaccatggatgttcaaggtcatggcacacatgttgctggcacgattgcatcttatgggagtgtaagcggagtgatgcagagtgcgacactgatcccggtcaaagtgctcgataattctggcagcgggtccctttacggtattacgcaaggcatattgtatgccgccgacatcgatgcggacgtcattaacatgtctctgggtggaggaggctataatcagagcatggatgaggctgttcaaacagcagttgctcagggaaccattgtagtagcagcgactggcaatgatggtgcatcgtcgatcagttatcctgctgcctacagcagcgtcattgcggtgggatctgtgacgtccaatcgtacacgatcctcgttttctaactatggatctgggcttgaagttatggcaccgggcagcaacatctacagtacgtatcctaattccagatatacatctttgagtggtacaagcatggctactccgcacgttgcgggcgtagctgggctcattcgcgcagccaacccagacatatctgtcgcgcaagcccgtcagattctgcgggataccgcgcaagaagcaggatcgttcacacagtacggctatggaatcgtcgatgctcatgccgccgttgttgctgcatccggtggtagcggcggc

SEQ ID NO: 320 - protein, 413 aa, synthetic construct
  REGION 1..413: note = Variant of serine peptidase from Bacillus sinesaloumensis
MADQASQANGNQDVIEGELIVSVEPKNGKPDVSIQSAQSVTGQEDVLKSKGFTIVDTLHVEDSSVKPLVSKNFNKKVVEKMGLVYLVQYSPDQFKSSNIAKKELRKELMDLGFKVRYISENYKMMAIEGTATLQAVHPNQNWHYNMIKAPEAWAITSGSQSVKVAVLDTGIDHNHPSLANFVNTNLGRSFVGGNTMDVQGHGTHVAGTIASYGSVSGVMQSATLIPVKVLDNSGSGSLYGITQGILYAADIDADVINMSLGGGGYNQSMDEAVQTAVAQGTIVVAATGNDGASSISYPAAYSSVIAVGSVTSNRTRSSFSNYGSGLEVMAPGSNIYSTYPNSRYTSLSGTSMATPHVAGVAGLIRAANPDISVAQARQILRDTAQEAGSFTQYGYGIVDAHAAVVAASGGSGG

SEQ ID NO: 321 - DNA, 1239 bp, synthetic construct
  misc_feature 1..1239: note = Variant of serine peptidase from Bacillus sinesaloumensis
  source 1..1239: mol_type = other DNA
atggcagatcaagctagtcaagctaatggaaaccaggacgtcattgaaggcgagctgatcgtttcagtggaaccgaagaacggtaaacctgatgtgagcattcaaagtgcacaatccgtaacagggcaggaagacgtccttaaatcgaaaggctttacgatcgttgataccttgcatgtagaggatagcagcgtcaagccactcgtctcgaagaatttcaataagaaagtggtggagaagatgggactggtgtatcttgttcaatactctccggaccagtttaaaagttccaacattgcgaagaaagaactcagaaaagaattgatggatctgggctttaaagtccgctatataagcgaaaattacaagatgatggcgatcgaaggtacagccactcttcaggcagtacaccctaaccaaaactggcattataatatgattaaagctccggaagcgtgggctattacgtctggatcctctagcgttaaagtagcagtcctggatacagggatcgaccataatcacccatccttggccaacttcgtgaatactaatcttggccggtcgtttgttggaggaaacaccatggatgttcaaggtcatggcacacatgttgctggcacgattgcatcttatgggagtgtaagcggagtgatgcagagtgcgacactgatcccggtcaaagtgctcgataattctggcagcgggtccctttacggtattacgcaaggcatattgtatgccgccgacatcgatgcggacgtcattaacatgtctctgggtggaggaggctataatcagagcatggatgaggctgttcaaacagcagttgctcagggaaccattgtagtagcagcgactggcaatgatggtgcatcgtcgatcagttatcctgctgcctacagcagcgtcattgcggtgggatctgtgacgtccaatcgtacacgatcctcgttttctaactatggatctgggcttgaagttatggcaccgggcagcaacatctacagtacgtatcctaattccagatatacatctttgagtggtacaagcatggctactccgcacgttgcgggcgtagctgggctcattcgcgcagccaacccaaagatatctgtcgcgcaagcccgtcagattctgcgggataccgcgcaagaagcaggatcgttcacacagtacggctatggaatcgtcgatgctcatgccgccgttgttgctgcatccggtggtagcggcggc

SEQ ID NO: 322 - protein, 413 aa, synthetic construct
  REGION 1..413: note = Variant of serine peptidase from Bacillus sinesaloumensis
MADQASQANGNQDVIEGELIVSVEPKNGKPDVSIQSAQSVTGQEDVLKSKGFTIVDTLHVEDSSVKPLVSKNFNKKVVEKMGLVYLVQYSPDQFKSSNIAKKELRKELMDLGFKVRYISENYKMMAIEGTATLQAVHPNQNWHYNMIKAPEAWAITSGSSSVKVAVLDTGIDHNHPSLANFVNTNLGRSFVGGNTMDVQGHGTHVAGTIASYGSVSGVMQSATLIPVKVLDNSGSGSLYGITQGILYAADIDADVINMSLGGGGYNQSMDEAVQTAVAQGTIVVAATGNDGASSISYPAAYSSVIAVGSVTSNRTRSSFSNYGSGLEVMAPGSNIYSTYPNSRYTSLSGTSMATPHVAGVAGLIRAANPKISVAQARQILRDTAQEAGSFTQYGYGIVDAHAAVVAASGGSGG

SEQ ID NO: 323 - DNA, 1239 bp, synthetic construct
  misc_feature 1..1239: note = Variant of serine peptidase from Bacillus sinesaloumensis
  source 1..1239: mol_type = other DNA
atggcagatcaagctagtcaagctaatggaaaccaggacgtcattgaaggcgagctgatcgtttcagtggaaccgaagaacggtaaacctgatgtgagcattcaaagtgcacaatccgtaacagggcaggaagacgtccttaaatcgaaaggctttacgatcgttgataccttgcatgtagaggatagcagcgtcaagccactcgtctcgaagaatttcaataagaaagtggtggagaagatgggactggtgtatcttgttcaatactctccggaccagtttaaaagttccaacattgcgaagaaagaactcagaaaagaattgatggatctgggctttaaagtccgctatataagcgaaaattacaagatgatgacgatcgaaggtacagccactcttcaggcagtacaccctaaccaaaactggcattataatatgattaaagctccggaagcgtgggctattacgtctggatcctctagcgttaaagtagcagtcctggatacagggatcgaccataatcacccatccttggccaacttcgtgaatactaatcttggccggtcgtttgtttgtggaaacaccatggatgttcaaggtcatggcacacatgttgctggcacgattgcatcttatgggagtgtaagcggagtgatgcagagtgcgacactgatcccggtcaaagtgctcgataattctggcagcgggtccctttacggtattacgcaaggcatattgtatgccgccgacatcgatgcggacgtcattaacatgtctctgggtggaggaggctataatcagagcatggatgaggctgttcaaacagcagttgctcagggaaccattgtagtagcagcgactggcaatgatggtgcatcgtcgatcagttatcctgctgcctacagcagcgtcattgcggtgggatctgtgacgtccaatcgtacacgatcctcgttttctaactatggatctgggcttgaagttatggcaccgggcagcaacatctacagtacgtatcctaattccagatatacatctttgagtggtacaagcatggctactccgcacgttgcgggcgtagctgggctcattcgcgcagccaacccagacatatctgtcgcgcaagcccgtcagattctgcgggataccgcgcaagaagcaggatcgttcacacagtacggctatggaatcgtcgatgctcatgccgccgttgttgctgcatccggtggtagcggcggc

SEQ ID NO: 324 - protein, 413 aa, synthetic construct
  REGION 1..413: note = Variant of serine peptidase from Bacillus sinesaloumensis
MADQASQANGNQDVIEGELIVSVEPKNGKPDVSIQSAQSVTGQEDVLKSKGFTIVDTLHVEDSSVKPLVSKNFNKKVVEKMGLVYLVQYSPDQFKSSNIAKKELRKELMDLGFKVRYISENYKMMTIEGTATLQAVHPNQNWHYNMIKAPEAWAITSGSSSVKVAVLDTGIDHNHPSLANFVNTNLGRSFVCGNTMDVQGHGTHVAGTIASYGSVSGVMQSATLIPVKVLDNSGSGSLYGITQGILYAADIDADVINMSLGGGGYNQSMDEAVQTAVAQGTIVVAATGNDGASSISYPAAYSSVIAVGSVTSNRTRSSFSNYGSGLEVMAPGSNIYSTYPNSRYTSLSGTSMATPHVAGVAGLIRAANPDISVAQARQILRDTAQEAGSFTQYGYGIVDAHAAVVAASGGSGG

SEQ ID NO: 325 - DNA, 1239 bp, synthetic construct
  misc_feature 1..1239: note = Variant of serine peptidase from Bacillus sinesaloumensis
  source 1..1239: mol_type = other DNA
atggcagatcaagctagtcaagctaatggaaaccaggacgtcattgaaggcgagctgatcgtttcagtggaaccgaagaacggtaaacctgatgtgagcattcaaagtgcacaatccgtaacagggcaggaagacgtccttaaatcgaaaggctttacgatcgttgataccttgcatgtagaggatagcagcgtcaagccactcgtctcgaagaatttcaataagaaagtggtggagaagatgggactggtgtatcttgttcaatactctccggaccagtttaaaagttccaacattgcgaagaaagaactcagaaaagaattgatggatctgggctttaaagtccgctatataagcgaaaattacaagatgatggcgatcgaaggtacagccactcttcaggcagtacaccctaaccaaaactggcattataatatgattaaagctccggaagcgtgggctattacgtctggatcctctagcgttaaagtagcagtcctggatacagggatcgaccataatcacccatccttggccaacttcgtgaatactaatcttggccggtcgtttgttggaggaaacaccatggatgttcaaggtcatggcacacatgttgctggcacgattgcatcttatgggagtgtaagcggagtgatgcagagtgcgacactgatcccggtcaaagtgctcgataattctggcagcgggtccctttacggtattacgcaaggcatattgtatgccgccgacatcgatgcggacgtcattaacatgtctctgggtggaggaggctataatcagagcatggatgaggctgttcaaacagcagttgctcagggaaccattgtagtagcagcgactggcaatgatggtgcatcgtcgatcagttatcctgctgcctacagcagcgtcattgcggtgggatctgtgacgtccaatcgtacacgatcctcgttttctaactatggatctgggcttgaagttatggcaccgggcagcaacatctacagtacgtatcctaattccagatatacatctttgagtggtacaagcatggctactccgcacgttgcgggcgtagctgggctcattcgcgcagccaacccagacatatctgtcgagcaagcccgtcagattctgcgggataccgcgcaagaagcaggatcgttcacacagtacggctatggaatcgtcgatgctcatgccgccgttgttgctgcatccggtggtagcggcggc

SEQ ID NO: 326 - protein, 413 aa, synthetic construct
  REGION 1..413: note = Variant of serine peptidase from Bacillus sinesaloumensis
MADQASQANGNQDVIEGELIVSVEPKNGKPDVSIQSAQSVTGQEDVLKSKGFTIVDTLHVEDSSVKPLVSKNFNKKVVEKMGLVYLVQYSPDQFKSSNIAKKELRKELMDLGFKVRYISENYKMMAIEGTATLQAVHPNQNWHYNMIKAPEAWAITSGSSSVKVAVLDTGIDHNHPSLANFVNTNLGRSFVGGNTMDVQGHGTHVAGTIASYGSVSGVMQSATLIPVKVLDNSGSGSLYGITQGILYAADIDADVINMSLGGGGYNQSMDEAVQTAVAQGTIVVAATGNDGASSISYPAAYSSVIAVGSVTSNRTRSSFSNYGSGLEVMAPGSNIYSTYPNSRYTSLSGTSMATPHVAGVAGLIRAANPDISVEQARQILRDTAQEAGSFTQYGYGIVDAHAAVVAASGGSGG

SEQ ID NO: 327 - DNA, 1239 bp, synthetic construct
  misc_feature 1..1239: note = Variant of serine peptidase from Bacillus sinesaloumensis
  source 1..1239: mol_type = other DNA
atggcagatcaagctagtcaagctaatggaaaccaggacgtcattgaaggcgagctgatcgtttcagtggaaccgaagaacggtaaacctgatgtgagcattcaaagtgcacaatccgtaacagggcaggaagacgtccttaaatcgaaaggctttacgatcgttgataccttgcatgtagaggatagcagcgtcaagccactcgtctcgaagaatttcaataagaaagtggtggagaagatgggactggtgtatcttgttcaatactctccggaccagtttaaaagttccaacattgcgaagaaagaactcagaaaagaattgatggatctgggctttaaagtccgctatataagcgaaaattacaagatgatggcgatcaagggtacagccactcttcaggcagtacaccctaaccaaaactggcattataatatgattaaagctccggaagcgtgggctattacgtctggatcctctagcgttaaagtagcagtcctggatacagggatcgaccataatcacccatccttggccaacttcgtgaatactaatcttggccggtcgtttgttggaggaaacaccatggatgttcaaggtcatggcacacatgttgctggcacgattgcatcttatgggagtgtaagcggagtgatgcagagtgcgacactgatcccggtcaaagtgctcgataattctggcagcgggtccctttacggtattacgcaaggcatattgtatgccgccgacatcgatgcggacgtcattaacatgtctctgggtggaggaggctataatcagagcatggatgaggctgttcaaacagcagttgctcagggaaccattgtagtagcagcgactggcaatgatggtgcatcgtcgatcagttatcctgctgcctacagcagcgtcattgcggtgggatctgtgacgtccaatcgtacacgatcctcgttttctaactatggatctgggcttgaagttatggcaccgggcagcaacatctacagtacgtatcctaattccagatatacatctttgagtggtacaagcatggctactccgcacgttgcgggcgtagctgggctcattcgcgcagccaacccagacatatctgtcgcgcaagcccgtcagattctgcgggataccgcgcaagaagcaggatcgttcacacagtacggctatggaatcgtcgatgctcatgccgccgttgttgctgcatccggtggtagcggcggc

SEQ ID NO: 328 - protein, 413 aa, synthetic construct
  REGION 1..413: note = Variant of serine peptidase from Bacillus sinesaloumensis
MADQASQANGNQDVIEGELIVSVEPKNGKPDVSIQSAQSVTGQEDVLKSKGFTIVDTLHVEDSSVKPLVSKNFNKKVVEKMGLVYLVQYSPDQFKSSNIAKKELRKELMDLGFKVRYISENYKMMAIKGTATLQAVHPNQNWHYNMIKAPEAWAITSGSSSVKVAVLDTGIDHNHPSLANFVNTNLGRSFVGGNTMDVQGHGTHVAGTIASYGSVSGVMQSATLIPVKVLDNSGSGSLYGITQGILYAADIDADVINMSLGGGGYNQSMDEAVQTAVAQGTIVVAATGNDGASSISYPAAYSSVIAVGSVTSNRTRSSFSNYGSGLEVMAPGSNIYSTYPNSRYTSLSGTSMATPHVAGVAGLIRAANPDISVAQARQILRDTAQEAGSFTQYGYGIVDAHAAVVAASGGSGG

SEQ ID NO: 329 - DNA, 1239 bp, synthetic construct
  misc_feature 1..1239: note = Variant of serine peptidase from Bacillus sinesaloumensis
  source 1..1239: mol_type = other DNA
atggcagatcaagctagtcaagctaatggaaaccaggacgtcattgaaggcgagctgatcgtttcagtggaaccgaagaacggtaaacctgatgtgagcattcaaagtgcacaatccgtaacagggcaggaagacgtccttaaatcgaaaggctttacgatcgttgataccttgcatgtagaggatagcagcgtcaagccactcgtctcgaagaatttcaataagaaagtggtggagaagatgggactggtgtatcttgttcaatactctccggaccagtttaaaagttccaacattgcgaagaaagaactcagaaaagaattgatggatctgggctttaaagtccgctatataagcgaaaattacaagatgatggcgatcgaaggtacagccactcttcaggcagtacaccctaaccaaaactggcattataatatgattaaagctccggaagcgtgggctattacgtctggatcctgtagcgttaaagtagcagtcctggatacagggatcgaccataatcacccatccttggccaacttcgtgaatactaatcttggccggtcgtttgttggaggaaacaccatggatgttcaaggtcatggcacacatgttgctggcacgattgcatcttatgggagtgtaagcggagtgatgcagagtgcgacactgatcccggtcaaagtgctcgataattctggcagcgggtccctttacggtattacgcaaggcatattgtatgccgccgacatcgatgcggacgtcattaacatgtctctgggtggaggaggctataatcagagcatggatgaggctgttcaaacagcagttgctcagggaaccattgtagtagcagcgactggcaatgatggtgcatcgtcgatcagttatcctgctgcctacagcagcgtcattgcggtgggatctgtgacgtccaatcgtacacgatcctcgttttctaactatggatctgggcttgaagttatggcaccgggcagcaacatctacagtacgtatcctaattccagatatacatctttgagtggtacaagcatggctactccgcacgttgcgggcgtagctgggctcattcgcgcagccaacccagacatatctgtcgcgcaagcccgtcagattctgcgggataccgcgcaagaagcaggatcgttcacacagtacggctatggaatcgtcgatgctcatgccgccgttgttgctgcatccggtggtagcggcggc

SEQ ID NO: 330 - protein, 413 aa, synthetic construct
  REGION 1..413: note = Variant of serine peptidase from Bacillus sinesaloumensis
MADQASQANGNQDVIEGELIVSVEPKNGKPDVSIQSAQSVTGQEDVLKSKGFTIVDTLHVEDSSVKPLVSKNFNKKVVEKMGLVYLVQYSPDQFKSSNIAKKELRKELMDLGFKVRYISENYKMMAIEGTATLQAVHPNQNWHYNMIKAPEAWAITSGSCSVKVAVLDTGIDHNHPSLANFVNTNLGRSFVGGNTMDVQGHGTHVAGTIASYGSVSGVMQSATLIPVKVLDNSGSGSLYGITQGILYAADIDADVINMSLGGGGYNQSMDEAVQTAVAQGTIVVAATGNDGASSISYPAAYSSVIAVGSVTSNRTRSSFSNYGSGLEVMAPGSNIYSTYPNSRYTSLSGTSMATPHVAGVAGLIRAANPDISVAQARQILRDTAQEAGSFTQYGYGIVDAHAAVVAASGGSGG

SEQ ID NO: 331 - DNA, 1239 bp, synthetic construct
  misc_feature 1..1239: note = Variant of serine peptidase from Bacillus sinesaloumensis
  source 1..1239: mol_type = other DNA
atggcagatcaagctagtcaagctaatggaaaccaggacgtcattgaaggcgagctgatcgtttcagtggaaccgaagaacggtaaacctgatgtgagcattcaaagtgcacaatccgtaacagggcaggaagacgtccttaaatcgaaaggctttacgatcgttgataccttgcatgtagaggatagcagcgtcaagccactcgtctcgaagaatttcaataagaaagtggtggagaagatgggactggtgtatcttgttcaatactctccggaccagtttaaaagttccaacattgcgaagaaagaactcagaaaagaattgatggatctgggctttaaagtccgctatataagcgaaaattacaagatgatggcgatcgaaggtacagccactcttcaggcagtacaccctaaccaaaactggcattataatatgattaaagctccggaagcgtgggctattacgtctggatcctctagcgttaaagtagcagtcctggatacagggatcgaccataatcacccatccttggccaacttcgtgaatactaatagtggccggtcgtttgttggaggaaacaccatggatgttcaaggtcatggcacacatgttgctggcacgattgcatcttatgggagtgtaagcggagtgatgcagagtgcgacactgatcccggtcaaagtgctcgataattctggcagcgggtccctttacggtattacgcaaggcatattgtatgccgccgacatcgatgcggacgtcattaacatgtctctgggtggaggaggctataatcagagcatggatgaggctgttcaaacagcagttgctcagggaaccattgtagtagcagcgactggcaatgatggtgcatcgtcgatcagttatcctgctgcctacagcagcgtcattgcggtgggatctgtgacgtccaatcgtacacgatcctcgttttctaactatggatctgggcttgaagttatggcaccgggcagcaacatctacagtacgtatcctaattccagatatacatctttgagtggtacaagcatggctactccgcacgttgcgggcgtagctgggctcattcgcgcagccaacccagacatatctgtcgcgcaagcccgtcagattctgcgggataccgcgcaagaagcaggatcgttcacacagtacggctatggaatcgtcgatgctcatgccgccgttgttgctgcatccggtggtagcggcggc

SEQ ID NO: 332 - protein, 413 aa, synthetic construct
  REGION 1..413: note = Variant of serine peptidase from Bacillus sinesaloumensis
MADQASQANGNQDVIEGELIVSVEPKNGKPDVSIQSAQSVTGQEDVLKSKGFTIVDTLHVEDSSVKPLVSKNFNKKVVEKMGLVYLVQYSPDQFKSSNIAKKELRKELMDLGFKVRYISENYKMMAIEGTATLQAVHPNQNWHYNMIKAPEAWAITSGSSSVKVAVLDTGIDHNHPSLANFVNTNSGRSFVGGNTMDVQGHGTHVAGTIASYGSVSGVMQSATLIPVKVLDNSGSGSLYGITQGILYAADIDADVINMSLGGGGYNQSMDEAVQTAVAQGTIVVAATGNDGASSISYPAAYSSVIAVGSVTSNRTRSSFSNYGSGLEVMAPGSNIYSTYPNSRYTSLSGTSMATPHVAGVAGLIRAANPDISVAQARQILRDTAQEAGSFTQYGYGIVDAHAAVVAASGGSGG

SEQ ID NO: 333 - DNA, 1239 bp, synthetic construct
  misc_feature 1..1239: note = Variant of serine peptidase from Bacillus sinesaloumensis
  source 1..1239: mol_type = other DNA
atggcagatcaagctagtcaagctaatggaaaacaggacgtcattgaaggcgagctgatcgtttcagtggaaccgaagaacggtaaacctgatgtgagcattcaaagtgcacaatccgtaacagggcaggaagacgtccttaaatcgaaaggctttacgatcgttgataccttgcatgtagaggatagcagcgtcaagccactcgtctcgaagaatttcaataagaaagtggtggagaagatgggactggtgtatcttgttcaatactctccggaccagtttaaaagttccaacattgcgaagaaagaactcagaaaagaattgatggatctgggctttaaagtccgctatataagcgaaaattacaagatgatggcgatcgaaggtacagccactcttcaggcagtacaccctaaccaaaactggcattataatatgattaaagctccggaagcgtgggctattacgtctggatcctctagcgttaaagtagcagtcctggatacagggatcgaccataatcacccatccttggccaacttcgtgaatactaatcttggccggtcgtttgttggaggaaacaccatggatgttcaaggtcatggcacacatgttgctggcacgattgcatcttatgggagtgtaagcggagtgatgaagagtgcgacactgatcccggtcaaagtgctcgataattctggcagcgggtccctttacggtattacgcaaggcatattgtatgccgccgacatcgatgcggacgtcattaacatgtctctgggtggaggaggctataatcagagcatggatgaggctgttcaaacagcagttgctcagggaaccattgtagtagcagcgactggcaatgatggtgcatcgtcgatcagttatcctgctgcctacagcagcgtcattgcggtgggatctgtgacgtccaatcgtacacgatcctcgttttctaactatggatctgggcttgaagttatggcaccgggcagcaacatctacagtacgtatcctaattccagatatacatctttgagtggtacaagcatggctactccgcacgttgcgggcgtagctgggctcattcgcgcagccaacccagacatatctgtcgcgcaagcccgtcagattctgcgggataccgcgcaagaagcaggatcgttcacacagtacggctatggaatcgtcgatgctcatgccgccgttgttgctgcatccggtggtagcggcggc

SEQ ID NO: 334 - protein, 413 aa, synthetic construct
  REGION 1..413: note = Variant of serine peptidase from Bacillus sinesaloumensis
MADQASQANGKQDVIEGELIVSVEPKNGKPDVSIQSAQSVTGQEDVLKSKGFTIVDTLHVEDSSVKPLVSKNFNKKVVEKMGLVYLVQYSPDQFKSSNIAKKELRKELMDLGFKVRYISENYKMMAIEGTATLQAVHPNQNWHYNMIKAPEAWAITSGSSSVKVAVLDTGIDHNHPSLANFVNTNLGRSFVGGNTMDVQGHGTHVAGTIASYGSVSGVMKSATLIPVKVLDNSGSGSLYGITQGILYAADIDADVINMSLGGGGYNQSMDEAVQTAVAQGTIVVAATGNDGASSISYPAAYSSVIAVGSVTSNRTRSSFSNYGSGLEVMAPGSNIYSTYPNSRYTSLSGTSMATPHVAGVAGLIRAANPDISVAQARQILRDTAQEAGSFTQYGYGIVDAHAAVVAASGGSGG

SEQ ID NO: 335 - DNA, 1239 bp, synthetic construct
  misc_feature 1..1239: note = Variant of serine peptidase from Bacillus sinesaloumensis
  source 1..1239: mol_type = other DNA
atggcagatcaagctagtcaagctaatggaaaccaggacgtcattgaaggcgagctgatcgtttcagtggaaccgaagaacggtaaacctgatgtgagcattcaaagtgcacaatccgtaacagggcaggaagacgtccttaaatcgaaaggctttacgatcgttgataccttgcatgtagaggatagcagcgtcaagccactcgtctcgaagaatttcaataagaaagtggtggagaagatgggactggtgtatcttgttcaatactctccggaccagtttaaaagttccaacattgcgaagaaagaactcagaaaagaattgatggatctgggctttaaagtccgctatataagcgaaaattacaagatgatggcgatcgaaggtacagccactctttgggcagtacaccctaaccaaaactggcattataatatgattaaagctccggaagcgtgggctattacgtctggatcctctagcgttaaagtagcagtcctggatacagggatcgaccataatcacccatccttggccaacttcgtgaatactaatcttggccggtcgtttgttggaggaaacaccatggatgttcaaggtcatggcacacatgttgctggcacgattgcatcttatgggagtgtaagcggagtgatgcagagtgcgacactgatcccggtcaaagtgctcgataattctggcagcgggtccctttacggtattacgcaaggcatattgtatgccgccgacatcgatgcggacgtcattaacatgtctctgggtggaggaggctataatcagagcatggatgaggctgttcaaacagcagttgctcagggaaccattgtagtagcagcgactggcaatgatggtgcatcgtcgatcagttatcctgctgcctacagcagcgtcattgcggtgggatctgtgacgtccaatcgtacacgatcctcgttttctaactatggatctgggcttgaagttatggcaccgggcagcaacatctacagtacgtatcctaattccagatatacatctttgagtggtacaagcatggctactccgcacgttgcgggcgtagctgggctcattcgcgcagccaacccagacatatctgtcgcgcaagcccgtcagattctgcgggataccgcgcaagaagcaggatcgttcacacagtacggctatggaatcgtcgatgctcatgccgccgttgttgctgcatccggtggtagcggcggc

SEQ ID NO: 336 - protein, 413 aa, synthetic construct
  REGION 1..413: note = Variant of serine peptidase from Bacillus sinesaloumensis
MADQASQANGNQDVIEGELIVSVEPKNGKPDVSIQSAQSVTGQEDVLKSKGFTIVDTLHVEDSSVKPLVSKNFNKKVVEKMGLVYLVQYSPDQFKSSNIAKKELRKELMDLGFKVRYISENYKMMAIEGTATLWAVHPNQNWHYNMIKAPEAWAITSGSSSVKVAVLDTGIDHNHPSLANFVNTNLGRSFVGGNTMDVQGHGTHVAGTIASYGSVSGVMQSATLIPVKVLDNSGSGSLYGITQGILYAADIDADVINMSLGGGGYNQSMDEAVQTAVAQGTIVVAATGNDGASSISYPAAYSSVIAVGSVTSNRTRSSFSNYGSGLEVMAPGSNIYSTYPNSRYTSLSGTSMATPHVAGVAGLIRAANPDISVAQARQILRDTAQEAGSFTQYGYGIVDAHAAVVAASGGSGG

SEQ ID NO: 337 - DNA, 1239 bp, synthetic construct
  misc_feature 1..1239: note = Variant of serine peptidase from Bacillus sinesaloumensis
  source 1..1239: mol_type = other DNA
atggcagatcaagctagtcaagctaatggaaaccaggacgtcattgaaggcgagctgatcgtttcagtggaaccgaagaacggtaaacctgatgtgagcattcaaagtgcacaatccgtaacagggcaggaagacgtccttaaatcgaaaggctttacgatcgttgataccttgcatgtagaggatagcagcgtcaagccactcgtctcgaagaatttcaataagaaagtggtggagaagatgggactggtgtatcttgttcaatactctccggaccagtttaaaagttccaacattgcgaagaaagaactcagaaaagaattgatggatctgggctttaaagtccgctatataagcgaaaattacaagatgatggcgatcgaagtgacagccactcttcaggcagtacaccctaaccaaaactggcattataatatgattaaagctccggaagcgtgggctattacgtctggatcctctagcgttaaagtagcagtcctggatacagggatcgaccataatcacccatccttggccaacttcgtgaatactaatcttggccggtcgtttgttggaggaaacaccatggatgttcaaggtcatggcacacatgttgctggcacgattgcatcttatgggagtgtaagcggagtgatgcagagtgcgacactgatcccggtcaaagtgctcgataattctggcagcgggtccctttacggtattacgcaaggcatattgtatgccgccgacatcgatgcggacgtcattaacatgtctctgggtggaggaggctataatcagagcatggatgaggctgttcaaacagcagttgctcagggaaccattgtagtagcagcgactggcaatgatggtgcatcgtcgatcagttatcctgctgcctacagcagcgtcattgcggtgggatctgtgacgtccaatcgtacacgatcctcgttttctaactatggatctgggcttgaagttatggcaccgggcagcaacatctacagtacgtatcctaattccagatatacatctttgagtggtacaagcatggctactccgcacgttgcgggcgtagctgggctcattcgcgcagccaacccagacatatctgtcgcgcaagcccgtcagattctgcgggataccgcgcaagaagcaggatcgttcacacagtacggctatggaatcgtcgatgctcatgccgccgttgttgctgcatccggtggtagcggcggc

SEQ ID NO: 338 - protein, 413 aa, synthetic construct
  REGION 1..413: note = Variant of serine peptidase from Bacillus sinesaloumensis
MADQASQANGNQDVIEGELIVSVEPKNGKPDVSIQSAQSVTGQEDVLKSKGFTIVDTLHVEDSSVKPLVSKNFNKKVVEKMGLVYLVQYSPDQFKSSNIAKKELRKELMDLGFKVRYISENYKMMAIEVTATLQAVHPNQNWHYNMIKAPEAWAITSGSSSVKVAVLDTGIDHNHPSLANFVNTNLGRSFVGGNTMDVQGHGTHVAGTIASYGSVSGVMQSATLIPVKVLDNSGSGSLYGITQGILYAADIDADVINMSLGGGGYNQSMDEAVQTAVAQGTIVVAATGNDGASSISYPAAYSSVIAVGSVTSNRTRSSFSNYGSGLEVMAPGSNIYSTYPNSRYTSLSGTSMATPHVAGVAGLIRAANPDISVAQARQILRDTAQEAGSFTQYGYGIVDAHAAVVAASGGSGG

SEQ ID NO: 339 - DNA, 1239 bp, synthetic construct
  misc_feature 1..1239: note = Variant of serine peptidase from Bacillus sinesaloumensis
  source 1..1239: mol_type = other DNA
atggcagatcaagctagtcaagctaatggaaaccaggacgtcattgaaggcgagctgatcgtttcagtggaaccgaagaacggtaaacctgatgtgagcattcaaagtgcacaatccgtaacagggcaggaagacgtccttaaatcgaaaggctttacgatcgttgataccttgcatgtagaggatagcagcgtcaagccactcgtctcgaagaatttcaataagaaagtggtggagaagatgggactggtgtatcttgttcaatactctccggaccagtttaaaagttccaacattgcgaagaaagaactcagaaaagaattgatggatctgggctttaaagtccgctatataagcgaaaattacaagatgatggcgatcttgggtacagccactcttcaggcagtacaccctaaccaaaactggcattataatatgattaaagctccggaagcgtgggctattacgtctggatcctctagcgttaaagtagcagtcctggatacagggatcgaccataatcacccatccttggccaacttcgtgaatactaatcttggccggtcgtttgttggaggaaacaccatggatgttcaaggtcatggcacacatgttgctggcacgattgcatcttatgggagtgtaagcggagtgatgcagagtgcgacactgatcccggtcaaagtgctcgataattctggcagcgggtccctttacggtattacgcaaggcatattgtatgccgccgacatcgatgcggacgtcattaacatgtctctgggtggaggaggctataatcagagcatggatgaggctgttcaaacagcagttgctcagggaaccattgtagtagcagcgactggcaatgatggtgcatcgtcgatcagttatcctgctgcctacagcagcgtcattgcggtgggatctgtgacgtccaatcgtacacgatcctcgttttctaactatggatctgggcttgaagttatggcaccgggcagcaacatctacagtacgtatcctaattccagatatacatctttgagtggtacaagcatggctactccgcacgttgcgggcgtagctgggctcattcgcgcagccaacccagacatatctgtcgcgcaagcccgtcagattctgcgggataccgcgcaagaagcaggatcgttcacacagtacggctatggaatcgtcgatgctcatgccgccgttgttgctgcatccggtggtagcggcggc

SEQ ID NO: 340 - protein, 413 aa, synthetic construct
  REGION 1..413: note = Variant of serine peptidase from Bacillus sinesaloumensis
MADQASQANGNQDVIEGELIVSVEPKNGKPDVSIQSAQSVTGQEDVLKSKGFTIVDTLHVEDSSVKPLVSKNFNKKVVEKMGLVYLVQYSPDQFKSSNIAKKELRKELMDLGFKVRYISENYKMMAILGTATLQAVHPNQNWHYNMIKAPEAWAITSGSSSVKVAVLDTGIDHNHPSLANFVNTNLGRSFVGGNTMDVQGHGTHVAGTIASYGSVSGVMQSATLIPVKVLDNSGSGSLYGITQGILYAADIDADVINMSLGGGGYNQSMDEAVQTAVAQGTIVVAATGNDGASSISYPAAYSSVIAVGSVTSNRTRSSFSNYGSGLEVMAPGSNIYSTYPNSRYTSLSGTSMATPHVAGVAGLIRAANPDISVAQARQILRDTAQEAGSFTQYGYGIVDAHAAVVAASGGSGG

SEQ ID NO: 341 - DNA, 1239 bp, synthetic construct
  misc_feature 1..1239: note = Variant of serine peptidase from Bacillus sinesaloumensis
  source 1..1239: mol_type = other DNA
atggcagatcaagctagtcaagctaatggaaaccaggacgtcattgaaggcgagctgatcgtttcagtggaaccgaagaacggtaaacctgatgtgagcattcaaagtgcacaatccgtaacagggcaggaagacgtccttaaatcgaaaggctttacgatcgttgataccttgcatgtagaggatagcagcgtcaagccactcgtctcgaagaatttcaataagaaagtggtggagaagatgggactggtgtatcttgttcaatactctccggaccagtttaaaagttccaacattgcgaagaaagaactcagaaaagaattgatggatctgggctttaaagtccgctatataagcgaaaattacaagatgatggcgatcgaaggtacagccactcttcaggcagtacaccctaaccaaaactggcattataatatgattaaagctccgcaggcgtgggctattacgtctggatcctctagcgttaaagtagcagtcctggatacagggatcgaccataatcacccatccttggccaacttcgtgaatactaatcttggccggtcgtttgttggaggaaacaccatggatgttcaaggtcatggcacacatgttgctggcacgattgcatcttatgggagtgtaagcggagtgatgcagagtgcgacactgatcccggtcaaagtgctcgataattctggcagcgggtccctttacggtattacgcaaggcatattgtatgccgccgacatcgatgcggacgtcattaacatgtctctgggtggaggaggctataatcagagcatggatgaggctgttcaaacagcagttgctcagggaaccattgtagtagcagcgactggcaatgatggtgcatcgtcgatcagttatcctgctgcctacagcagcgtcattgcggtgggatctgtgacgtccaatcgtacacgatcctcgttttctaactatggatctgggcttgaagttatggcaccgggcagcaacatctacagtacgtatcctaattccagatatacatctttgagtggtacaagcatggctactccgcacgttgcgggcgtagctgggctcattcgcgcagccaacccagacatatctgtcgcgcaagcccgtcagattctgcgggataccgcgcaagaagcaggatcgttcacacagtacggctatggaatcgtcgatgctcatgccgccgttgttgctgcatccggtggtagcggcggc

SEQ ID NO: 342 - protein, 413 aa, synthetic construct
  REGION 1..413: note = Variant of serine peptidase from Bacillus sinesaloumensis
MADQASQANGNQDVIEGELIVSVEPKNGKPDVSIQSAQSVTGQEDVLKSKGFTIVDTLHVEDSSVKPLVSKNFNKKVVEKMGLVYLVQYSPDQFKSSNIAKKELRKELMDLGFKVRYISENYKMMAIEGTATLQAVHPNQNWHYNMIKAPQAWAITSGSSSVKVAVLDTGIDHNHPSLANFVNTNLGRSFVGGNTMDVQGHGTHVAGTIASYGSVSGVMQSATLIPVKVLDNSGSGSLYGITQGILYAADIDADVINMSLGGGGYNQSMDEAVQTAVAQGTIVVAATGNDGASSISYPAAYSSVIAVGSVTSNRTRSSFSNYGSGLEVMAPGSNIYSTYPNSRYTSLSGTSMATPHVAGVAGLIRAANPDISVAQARQILRDTAQEAGSFTQYGYGIVDAHAAVVAASGGSGG

SEQ ID NO: 343 - DNA, 1239 bp, synthetic construct
  misc_feature 1..1239: note = Variant of serine peptidase from Bacillus sinesaloumensis
  source 1..1239: mol_type = other DNA
atggcagatcaagctagtcaagctaatggaaaccaggacgtcattgaaggcgagctgatcgtttcagtggaaccgaagaacggtaaacctgatgtgagcattcaaagtgcacaatccgtaacagggcaggaagacgtccttaaatcgaaaggctttacgatcgttgataccttgcatgtagaggatagcagcgtcaagccactcgtctcgaagaatttcaataagaaagtggtggagaagatgggactggtgtatcttgttcaatactctccggaccagtttaaaagttccaacattgcgaagaaagaactcagaaaagaattgatggatctgggctttaaagtccgctatataagcgaaaattacaagatgatggcgatcgaaggtacagccactcttcaggcagtacaccctaaccaaaactggcattataatatgattaaagctccggaagcgtgggctattacgtctggatcctctagcgttaaagtagcagtcctggatacagggatcgaccataatcacccatccttggccaacttcgtgaatactaatcttggccggtcgtttgttggaggaaacaccatggatgttcaaggtcatggcacacatgttgctggcacgattgcatcttatgggagtgtaagcggagtgatgcagagtgcgacactgatcccggtcaaagtgctcgataattctggcagcgggtccctttacggtattacgcaaggcatattgtatgccgccgacatcgatgcggacgtcattaacatgtctctgggtggaggaggctataatcagagcatggatgaggctgttcaaacagcagttgctcagggaaccattgtagtagcagcgactggcaatgatggtgcatcgtcgatcagttatcctgctgcctacagcagcgtcattgcggtgggatctgtgacgtccaatcgtacacgatcctcgttttctaactatggatctgggcttgaagttatggcaccgggcagcaacatctacagtacgtatcctaattccagatatacatctttgagtggtacaagcatggctactccgcacgttgcgggcgtagctgggctcattcgcgcagccaacccagacatatctgtcgcgatggcccgtcagattctgcgggataccgcgcaagaagcaggatcgttcacacagtacggctatggaatcgtcgatgctcatgccgccgttgttgctgcatccggtggtagcggcggc

SEQ ID NO: 344 - protein, 413 aa, synthetic construct
  REGION 1..413: note = Variant of serine peptidase from Bacillus sinesaloumensis
MADQASQANGNQDVIEGELIVSVEPKNGKPDVSIQSAQSVTGQEDVLKSKGFTIVDTLHVEDSSVKPLVSKNFNKKVVEKMGLVYLVQYSPDQFKSSNIAKKELRKELMDLGFKVRYISENYKMMAIEGTATLQAVHPNQNWHYNMIKAPEAWAITSGSSSVKVAVLDTGIDHNHPSLANFVNTNLGRSFVGGNTMDVQGHGTHVAGTIASYGSVSGVMQSATLIPVKVLDNSGSGSLYGITQGILYAADIDADVINMSLGGGGYNQSMDEAVQTAVAQGTIVVAATGNDGASSISYPAAYSSVIAVGSVTSNRTRSSFSNYGSGLEVMAPGSNIYSTYPNSRYTSLSGTSMATPHVAGVAGLIRAANPDISVAMARQILRDTAQEAGSFTQYGYGIVDAHAAVVAASGGSGG

SEQ ID NO: 345 - DNA, 1239 bp, synthetic construct
  misc_feature 1..1239: note = Variant of serine peptidase from Bacillus sinesaloumensis
  source 1..1239: mol_type = other DNA
atggcagatcaagctagtcaagctaatggaaaccaggacgtcattgaaggcgagctgatcgtttcagtggaaccgaagaacggtaaacctgatgtgagcattcaaagtgcacaatccgtaacagggcaggaagacgtccttaaatcgaaaggctttacgatcgttgataccttgcatgtagaggatagcagcgtcaagccactcgtctcgaagaatttcaataagaaagtggtggagaagatgggactggtgtatcttgttcaatactctccggaccagtttaaaagttccaacattgcgaagaaagaactcagaaaagaattgatggatctgggctttaaagtccgctatataagcgaaaattacaagatgatggcgatcgaaggtacagccactctttgtgcagtacaccctaaccaaaactggcattataatatgattaaagctccggaagcgtgggctattacgtctggatcctctagcgttaaagtagcagtcctggatacagggatcgaccataatcacccatccttggccaacttcgtgaatactaatcttggccggtcgtttgttggaggaaacaccatggatgttcaaggtcatggcacacatgttgctggcacgattgcatcttatgggagtgtaagcggagtgatgcagagtgcgacactgatcccggtcaaagtgctcgataattctggcagcgggtccctttacggtattacgcaaggcatattgtatgccgccgacatcgatgcggacgtcattaacatgtctctgggtggaggaggctataatcagagcatggatgaggctgttcaaacagcagttgctcagggaaccattgtagtagcagcgactggcaatgatggtgcatcgtcgatcagttatcctgctgcctacagcagcgtcattgcggtgggatctgtgacgtccaatcgtacacgatcctcgttttctaactatggatctgggcttgaagttatggcaccgggcagcaacatctacagtacgtatcctaattccagatatacatctttgagtggtacaagcatggctactccgcacgttgcgggcgtagctgggctcattcgcgcagccaacccagacatatctgtcgcgcaagcccgtcagattctgcgggataccgcgcaagaagcaggatcgttcacacagtacggctatggaatcgtcgatgctcatgccgccgttgttgctgcatccggtggtagcggcggc

SEQ ID NO: 346 - protein, 413 aa, synthetic construct
  REGION 1..413: note = Variant of serine peptidase from Bacillus sinesaloumensis
MADQASQANGNQDVIEGELIVSVEPKNGKPDVSIQSAQSVTGQEDVLKSKGFTIVDTLHVEDSSVKPLVSKNFNKKVVEKMGLVYLVQYSPDQFKSSNIAKKELRKELMDLGFKVRYISENYKMMAIEGTATLCAVHPNQNWHYNMIKAPEAWAITSGSSSVKVAVLDTGIDHNHPSLANFVNTNLGRSFVGGNTMDVQGHGTHVAGTIASYGSVSGVMQSATLIPVKVLDNSGSGSLYGITQGILYAADIDADVINMSLGGGGYNQSMDEAVQTAVAQGTIVVAATGNDGASSISYPAAYSSVIAVGSVTSNRTRSSFSNYGSGLEVMAPGSNIYSTYPNSRYTSLSGTSMATPHVAGVAGLIRAANPDISVAQARQILRDTAQEAGSFTQYGYGIVDAHAAVVAASGGSGG

SEQ ID NO: 347 - DNA, 1239 bp, synthetic construct
  misc_feature 1..1239: note = Variant of serine peptidase from Bacillus sinesaloumensis
  source 1..1239: mol_type = other DNA
atggcagatcaagctagtcaagctaatggaaaccaggacgtcattgaaggcgagctgatcgtttcagtggaaccgaagaacggtaaacctgatgtgagcattcaaagtgcacaatccgtaacagggcaggaagacgtccttaaatcgaaaggctttacgatcgttgataccttgcatgtagaggatagcagcgtcaagccactcgtctcgaagaatttcaataagaaagtggtggagaagatgggactggtgtatcttgttcaatactctccggaccagtttaaaagttccaacattgcgaagaaagaactcagaaaagaattgatggatctgggctttaaagtccgctatataagcgaaaattacaagatgatggcgatcgaaggtacagccactcttcaggcagtacaccctaaccaaaactggcattataatatgattaaagctccggaagcgtgggctattacgtctggatcctctagcgttaaagtagcagtcctggatacagggatcgaccataatcacccatccttggccaacttcgtgaatactaatcttggccggtcgtttgttggaggaaacaccatggatgttcaaggtcatggcacacatgttgctggcacgattgcatcttatgggagtgtaagcggagtgatgcagagtgcgacactgatcccggtcaaagtgctcgataattctggcagcgggtccctttacggtattacgcaaggcatattgtatgccgccgacatcgatgcggacgtcattaacatgtctctgggtggaggaggctataatcagagcatggatgaggctgttcaaacagcagttgctcagggaaccattgtagtagcagcgactggcaatgatggtgcatcgtcgatcagttatcctgctgcctacagcagcgtcattgcggtgggatctgtgacgtccaatcgtacacgatcctcgttttctaactatggatctgggcttgaagttatggcaccgggcagcaacatctacagtacgtatcctaattccagatatacatctttgagtggtacaagcatggctactccgcacgttgcgggcgtagctgggctcattcgcgcagccaacccagacatatctgtccgtcaagcccgtcagattctgcgggataccgcgcaagaagcaggatcgttcacacagtacggctatggaatcgtcgatgctcatgccgccgttgttgctgcatccggtggtagcggcggc

SEQ ID NO: 348 - protein, 413 aa, synthetic construct
  REGION 1..413: note = Variant of serine peptidase from Bacillus sinesaloumensis
MADQASQANGNQDVIEGELIVSVEPKNGKPDVSIQSAQSVTGQEDVLKSKGFTIVDTLHVEDSSVKPLVSKNFNKKVVEKMGLVYLVQYSPDQFKSSNIAKKELRKELMDLGFKVRYISENYKMMAIEGTATLQAVHPNQNWHYNMIKAPEAWAITSGSSSVKVAVLDTGIDHNHPSLANFVNTNLGRSFVGGNTMDVQGHGTHVAGTIASYGSVSGVMQSATLIPVKVLDNSGSGSLYGITQGILYAADIDADVINMSLGGGGYNQSMDEAVQTAVAQGTIVVAATGNDGASSISYPAAYSSVIAVGSVTSNRTRSSFSNYGSGLEVMAPGSNIYSTYPNSRYTSLSGTSMATPHVAGVAGLIRAANPDISVRQARQILRDTAQEAGSFTQYGYGIVDAHAAVVAASGGSGG

SEQ ID NO: 349 - DNA, 1239 bp, synthetic construct
  misc_feature 1..1239: note = Variant of serine peptidase from Bacillus sinesaloumensis
  source 1..1239: mol_type = other DNA
atggcagatcaagctagtcaagctaatggaaaccaggacgtcattgaaggcgagctgatcgtttcagtggaaccgaagaacggtaaacctgatgtgagcattcaaagtgcacaatccgtaacagggcaggaagacgtccttaaatcgaaaggctttacgatcgttgataccttgcatgtagaggatagcagcgtcaagccactcgtctcgaagaatttcaataagaaagtggtggagaagatgggactggtgtatcttgttcaatactctccggaccagtttaaaagttccaacattgcgaagaaagaactcagaaaagaattgatggatctgggctttaaagtccgctatataagcgaaaattacaagatgatggcgatcgaaggtacagccactcttcaggcagtacaccctaaccaaaactggcattataatatgattaaagctccggaagcgtgggctattacgtctggatccacgagcgttaaagtagcagtcctggatacagggatcgaccataatcacccatccttggccaacttcgtgaatactaatcttggccggtcgtttgttggaggaaacaccatggatgttcaaggtcatggcacacatgttgctggcacgattgcatcttatgggagtgtaagcggagtgatgcagagtgcgacactgatcccggtcaaagtgctcgataattctggcagcgggtccctttacggtattacgcaaggcatattgtatgccgccgacatcgatgcggacgtcattaacatgtctctgggtggaggaggctataatcagagcatggatgaggctgttcaaacagcagttgctcagggaaccattgtagtagcagcgactggcaatgatggtgcatcgtcgatcagttatcctgctgcctacagcagcgtcattgcggtgggatctgtgacgtccaatcgtacacgatcctcgttttctaactatggatctgggcttgaagttatggcaccgggcagcaacatctacagtacgtatcctaattccagatatacatctttgagtggtacaagcatggctactccgcacgttgcgggcgtagctgggctcattcgcgcagccaacccagacatatctgtcgcgcaagcccgtcagattctgcgggataccgcgcaagaagcaggatcgttcacacagtacggctatggaatcgtcgatgctcatgccgccgttgttgctgcatccggtggtagcggcggc

SEQ ID NO: 350 - protein, 413 aa, synthetic construct
  REGION 1..413: note = Variant of serine peptidase from Bacillus sinesaloumensis
MADQASQANGNQDVIEGELIVSVEPKNGKPDVSIQSAQSVTGQEDVLKSKGFTIVDTLHVEDSSVKPLVSKNFNKKVVEKMGLVYLVQYSPDQFKSSNIAKKELRKELMDLGFKVRYISENYKMMAIEGTATLQAVHPNQNWHYNMIKAPEAWAITSGSTSVKVAVLDTGIDHNHPSLANFVNTNLGRSFVGGNTMDVQGHGTHVAGTIASYGSVSGVMQSATLIPVKVLDNSGSGSLYGITQGILYAADIDADVINMSLGGGGYNQSMDEAVQTAVAQGTIVVAATGNDGASSISYPAAYSSVIAVGSVTSNRTRSSFSNYGSGLEVMAPGSNIYSTYPNSRYTSLSGTSMATPHVAGVAGLIRAANPDISVAQARQILRDTAQEAGSFTQYGYGIVDAHAAVVAASGGSGG

SEQ ID NO: 351 - DNA, 1239 bp, synthetic construct
  misc_feature 1..1239: note = Variant of serine peptidase from Bacillus sinesaloumensis
  source 1..1239: mol_type = other DNA
atggcagatcaagctagtcaagctaatggaaaccaggacgtcattgaaggcgagctgatcgtttcagtggaaccgaagaacggtaaacctgatgtgagcattcaaagtgcacaatccgtaacagggcaggaagacgtccttaaatcgaaaggctttacgatcgttgataccttgcatgtagaggatagcagcgtcaagccactcgtctcgaagaatttcaataagaaagtggtggagaagatgggactggtgtatcttgttcaatactctccggaccagtttaaaagttccaacattgcgaagaaagaactcagaaaagaattgatggatctgggctttaaagtccgctatataagcgaaaattacaagatgatggcgatcgaaggtacagccactcttcaggcagtacaccctaaccaaaactggcattataatatgattaaagctccggaagcgtgggctattacgtctggatcctctagcgttaaagtagcagtcctggatacagggatcgaccataatcacccatccttggccaacttcgtgaatactaatcttggccggtcgtttgttggaggaaacaccatggatgttcaaggtcatggcacacatgttgctggcacgattgcatcttatgggagtgtaagcggagtgatgcagagtgcgacactgatcccggtcaaagtgctcgataattctggcagcgggtccctttacggtattacgcaaggcatattgtatgccgccgacatcgatgcggacgtcattaacatgtctctgggtggaggaggctataatcagagcatggatgaggctgttcaaacagcagttgctacgggaaccattgtagtagcagcgactggcaatgatggtgcatcgtcgatcagttatcctgctgcctacagcagcgtcattgcggtgggatctgtgacgtccaatcgtacacgatcctcgttttctaactatggatctgggcttgaagttatggcaccgggcagcaacatctacagtacgtatcctaattccagatatacatctttgagtggtacaagcatggctactccgcacgttgcgggcgtagctgggctcattcgcgcagccaacccagacatatctgtcgcgcaagcccgtcagattctgcgggataccgcgcaagaagcaggatcgttcacacagtacggctatggaatcgtcgatgctcatgccgccgttgttgctgcatccggtggtagcggcggc

SEQ ID NO: 352 - protein, 413 aa, synthetic construct
  REGION 1..413: note = Variant of serine peptidase from Bacillus sinesaloumensis
MADQASQANGNQDVIEGELIVSVEPKNGKPDVSIQSAQSVTGQEDVLKSKGFTIVDTLHVEDSSVKPLVSKNFNKKVVEKMGLVYLVQYSPDQFKSSNIAKKELRKELMDLGFKVRYISENYKMMAIEGTATLQAVHPNQNWHYNMIKAPEAWAITSGSSSVKVAVLDTGIDHNHPSLANFVNTNLGRSFVGGNTMDVQGHGTHVAGTIASYGSVSGVMQSATLIPVKVLDNSGSGSLYGITQGILYAADIDADVINMSLGGGGYNQSMDEAVQTAVATGTIVVAATGNDGASSISYPAAYSSVIAVGSVTSNRTRSSFSNYGSGLEVMAPGSNIYSTYPNSRYTSLSGTSMATPHVAGVAGLIRAANPDISVAQARQILRDTAQEAGSFTQYGYGIVDAHAAVVAASGGSGG

SEQ ID NO: 353 - DNA, 1239 bp, synthetic construct
  misc_feature 1..1239: note = Variant of serine peptidase from Bacillus sinesaloumensis
  source 1..1239: mol_type = other DNA
atggcagatcaagctagtcaagctaatggaaaccaggacgtcattgaaggcgagctgatcgtttcagtggaaccgaagaacggtaaacctgatgtgagcattcaaagtgcacaatccgtaacagggcaggaagacgtccttaaatcgaaaggctttacgatcgttgataccttgcatgtagaggatagcagcgtcaagccactcgtctcgaagaatttcaataagaaagtggtggagaagatgggactggtgtatcttgttcaatactctccggaccagtttaaaagttccaacattgcgaagaaagaactcagaaaagaattgatggatctgggctttaaagtccgctatataagcgaaaattacaagatgatggcgatcgaaggtacagccactcttcaggcagtacaccctaaccaaaactggcattataatatgattaaagctccggaagcgtgggctattacgtctggatcctctagcgttaaagtagcagtcctggatacagggatcgaccataatcacccatccttggccaacttcgtgaatactaatcttggccggtcgtttgttggaggaaacaccatggatgttcaaggtcatggcacacatgttgctggcacgattgcatcttatgggagtgtaagcggagtgatgcagagtgcgacactgatcccggtcaaagtgctcgataattctggcagcgggtccctttacggtattacgcaaggcatattgtatgccgccgacatcgatgcggacgtcattaacatgtctctgggtggaggattttataatcagagcatggatgaggctgttcaaacagcagttgctcagggaaccattgtagtagcagcgactggcaatgatggtgcatcgtcgatcagttatcctgctgcctacagcagcgtcattgcggtgggatctgtgacgtccaatcgtacacgatcctcgttttctaactatggatctgggcttgaagttatggcaccgggcagcaacatctacagtacgtatcctaattccagatatacatctttgagtggtacaagcatggctactccgcacgttgcgggcgtagctgggctcattcgcgcagccaacccagacatatctgtcgcgcaagcccgtcagattctgcgggataccgcgcaagaagcaggatcgttcacacagtacggctatggaatcgtcgatgctcatgccgccgttgttgctgcatccggtggtagcggcggc

SEQ ID NO: 354 - protein, 413 aa, synthetic construct
  REGION 1..413: note = Variant of serine peptidase from Bacillus sinesaloumensis
MADQASQANGNQDVIEGELIVSVEPKNGKPDVSIQSAQSVTGQEDVLKSKGFTIVDTLHVEDSSVKPLVSKNFNKKVVEKMGLVYLVQYSPDQFKSSNIAKKELRKELMDLGFKVRYISENYKMMAIEGTATLQAVHPNQNWHYNMIKAPEAWAITSGSSSVKVAVLDTGIDHNHPSLANFVNTNLGRSFVGGNTMDVQGHGTHVAGTIASYGSVSGVMQSATLIPVKVLDNSGSGSLYGITQGILYAADIDADVINMSLGGGFYNQSMDEAVQTAVAQGTIVVAATGNDGASSISYPAAYSSVIAVGSVTSNRTRSSFSNYGSGLEVMAPGSNIYSTYPNSRYTSLSGTSMATPHVAGVAGLIRAANPDISVAQARQILRDTAQEAGSFTQYGYGIVDAHAAVVAASGGSGG

SEQ ID NO: 355 - DNA, 1239 bp, synthetic construct
  misc_feature 1..1239: note = Variant of serine peptidase from Bacillus sinesaloumensis
  source 1..1239: mol_type = other DNA
atggcagatcaagctagtcaagctaatggaaaccaggacgtcattgaaggcgagctgatcgtttcagtggaaccgaagaacggtaaacctgatgtgagcattcaaagtgcacaatccgtaacagggcaggaagacgtccttaaatcgaaaggctttacgatcgttgataccttgcatgtagaggatagcagcgtcaagccactcgtctcgaagaatttcaataagaaagtggtggagaagatgggactggtgtatcttgttcaatactctccggaccagtttaaaagttccaacattgcgaagaaagaactcagaaaagaattgatggatctgggctttaaagtccgctatataagcgaaaattacaagatgatggcgatcgaaggtacagcctgtcttcaggcagtacaccctaaccaaaactggcattataatatgattaaagctccggaagcgtgggctattacgtctggatcctctagcgttaaagtagcagtcctggatacagggatcgaccataatcacccatccttggccaacttcgtgaatactaatcttggccggtcgtttgttggaggaaacaccatggatgttcaaggtcatggcacacatgttgctggcacgattgcatcttatgggagtgtaagcggagtgatgcagagtgcgacactgatcccggtcaaagtgctcgataattctggcagcgggtccctttacggtattacgcaaggcatattgtatgccgccgacatcgatgcggacgtcattaacatgtctctgggtggaggaggctataatcagagcatggatgaggctgttcaaacagcagttgctcagggaaccattgtagtagcagcgactggcaatgatggtgcatcgtcgatcagttatcctgctgcctacagcagcgtcattgcggtgggatctgtgacgtccaatcgtacacgatcctcgttttctaactatggatctgggcttgaagttatggcaccgggcagcaacatctacagtacgtatcctaattccagatatacatctttgagtggtacaagcatggctactccgcacgttgcgggcgtagctgggctcattcgcgcagccaacccagacatatctgtcgcgcaagcccgtcagattctgcgggataccgcgcaagaagcaggatcgttcacacagtacggctatggaatcgtcgatgctcatgccgccgttgttgctgcatccggtggtagcggcggc

SEQ ID NO: 356 - protein, 413 aa, synthetic construct
  REGION 1..413: note = Variant of serine peptidase from Bacillus sinesaloumensis
MADQASQANGNQDVIEGELIVSVEPKNGKPDVSIQSAQSVTGQEDVLKSKGFTIVDTLHVEDSSVKPLVSKNFNKKVVEKMGLVYLVQYSPDQFKSSNIAKKELRKELMDLGFKVRYISENYKMMAIEGTACLQAVHPNQNWHYNMIKAPEAWAITSGSSSVKVAVLDTGIDHNHPSLANFVNTNLGRSFVGGNTMDVQGHGTHVAGTIASYGSVSGVMQSATLIPVKVLDNSGSGSLYGITQGILYAADIDADVINMSLGGGGYNQSMDEAVQTAVAQGTIVVAATGNDGASSISYPAAYSSVIAVGSVTSNRTRSSFSNYGSGLEVMAPGSNIYSTYPNSRYTSLSGTSMATPHVAGVAGLIRAANPDISVAQARQILRDTAQEAGSFTQYGYGIVDAHAAVVAASGGSGG

SEQ ID NO: 357 - DNA, 1239 bp, synthetic construct
  misc_feature 1..1239: note = Variant of serine peptidase from Bacillus sinesaloumensis
  source 1..1239: mol_type = other DNA
atggcagatcaagctagtcaagctaatggaaaccaggacgtcattgaaggcgagctgatcgtttcagtggaaccgaagaacggtaaacctgatgtgagcattcaaagtgcacaatccgtaacagggcaggaagacgtccttaaatcgaaaggctttacgatcgttgataccttgcatgtagaggatagcagcgtcaagccactcgtctcgaagaatttcaataagaaagtggtggagaagatgggactggtgtatcttgttcaatactctccggaccagtttaaaagttccaacattgcgaagaaagaactcagaaaagaattgatggatctgggctttaaagtccgctatataagcgaaaattacaagatgatggcgatcgaatttacagccactcttcaggcagtacaccctaaccaaaactggcattataatatgattaaagctccggaagcgtgggctattacgtctggatcctctagcgttaaagtagcagtcctggatacagggatcgaccataatcacccatccttggccaacttcgtgaatactaatcttggccggtcgtttgttggaggaaacaccatggatgttcaaggtcatggcacacatgttgctggcacgattgcatcttatgggagtgtaagcggagtgatgcagagtgcgacactgatcccggtcaaagtgctcgataattctggcagcgggtccctttacggtattacgcaaggcatattgtatgccgccgacatcgatgcggacgtcattaacatgtctctgggtggaggaggctataatcagagcatggatgaggctgttcaaacagcagttgctcagggaaccattgtagtagcagcgactggcaatgatggtgcatcgtcgatcagttatcctgctgcctacagcagcgtcattgcggtgggatctgtgacgtccaatcgtacacgatcctcgttttctaactatggatctgggcttgaagttatggcaccgggcagcaacatctacagtacgtatcctaattccagatatacatctttgagtggtacaagcatggctactccgcacgttgcgggcgtagctgggctcattcgcgcagccaacccagacatatctgtcgcgcaagcccgtcagattctgcgggataccgcgcaagaagcaggatcgttcacacagtacggctatggaatcgtcgatgctcatgccgccgttgttgctgcatccggtggtagcggcggc

SEQ ID NO: 358 - protein, 413 aa, synthetic construct
  REGION 1..413: note = Variant of serine peptidase from Bacillus sinesaloumensis
MADQASQANGNQDVIEGELIVSVEPKNGKPDVSIQSAQSVTGQEDVLKSKGFTIVDTLHVEDSSVKPLVSKNFNKKVVEKMGLVYLVQYSPDQFKSSNIAKKELRKELMDLGFKVRYISENYKMMAIEFTATLQAVHPNQNWHYNMIKAPEAWAITSGSSSVKVAVLDTGIDHNHPSLANFVNTNLGRSFVGGNTMDVQGHGTHVAGTIASYGSVSGVMQSATLIPVKVLDNSGSGSLYGITQGILYAADIDADVINMSLGGGGYNQSMDEAVQTAVAQGTIVVAATGNDGASSISYPAAYSSVIAVGSVTSNRTRSSFSNYGSGLEVMAPGSNIYSTYPNSRYTSLSGTSMATPHVAGVAGLIRAANPDISVAQARQILRDTAQEAGSFTQYGYGIVDAHAAVVAASGGSGG

SEQ ID NO: 359 - DNA, 1239 bp, synthetic construct
  misc_feature 1..1239: note = Variant of serine peptidase from Bacillus sinesaloumensis
  source 1..1239: mol_type = other DNA
atggcagatcaagctagtcaagctaatggaaaccaggacgtcattgaaggcgagctgatcgtttcagtggaaccgaagaacggtaaacctgatgtgagcattcaaagtgcacaatccgtaacagggcaggaagacgtccttaaatcgaaaggctttacgatcgttgataccttgcatgtagaggatagcagcgtcaagccactcgtctcgaagaatttcaataagaaagtggtggagaagatgggactggtgtatcttgttcaatactctccggaccagtttaaaagttccaacattgcgaagaaagaactcagaaaagaattgatggatctgggctttaaagtccgctatataagcgaaaattacaagatgatggcgatcgaaggtacagccactcttcaggcagtacaccctaaccaaaactggcattataatatgattaaagctccggaagcgtgggctattacgtctggatcctctagcgttaaagtagcagtcctggatacagggatcgaccataatcacccatccttggccaacttcgtgaatactaatcttggccggtcgtttgttggaggaaacaccatggatgttcaaggtcatggcacacatgttgctggcacgattgcatcttatgggagtgtaagcggagtgatgcagagtgcgacactgatcccggtcaaagtgctcgataattctggcagcgggtccctttacggtattacgcaaggcatattgtatgccgccgacatcgatgcggacgtcattaacatgtctctgggtggaggagtttataatcagagcatggatgaggctgttcaaacagcagttgctcagggaaccattgtagtagcagcgactggcaatgatggtgcatcgtcgatcagttatcctgctgcctacagcagcgtcattgcggtgggatctgtgacgtccaatcgtacacgatcctcgttttctaactatggatctgggcttgaagttatggcaccgggcagcaacatctacagtacgtatcctaattccagatatacatctttgagtggtacaagcatggctactccgcacgttgcgggcgtagctgggctcattcgcgcagccaacccagacatatctgtcgcgcaagcccgtcagattctgcgggataccgcgcaagaagcaggatcgttcacacagtacggctatggaatcgtcgatgctcatgccgccgttgttgctgcatccggtggtagcggcggc

SEQ ID NO: 360 - protein, 413 aa, synthetic construct
  REGION 1..413: note = Variant of serine peptidase from Bacillus sinesaloumensis
MADQASQANGNQDVIEGELIVSVEPKNGKPDVSIQSAQSVTGQEDVLKSKGFTIVDTLHVEDSSVKPLVSKNFNKKVVEKMGLVYLVQYSPDQFKSSNIAKKELRKELMDLGFKVRYISENYKMMAIEGTATLQAVHPNQNWHYNMIKAPEAWAITSGSSSVKVAVLDTGIDHNHPSLANFVNTNLGRSFVGGNTMDVQGHGTHVAGTIASYGSVSGVMQSATLIPVKVLDNSGSGSLYGITQGILYAADIDADVINMSLGGGVYNQSMDEAVQTAVAQGTIVVAATGNDGASSISYPAAYSSVIAVGSVTSNRTRSSFSNYGSGLEVMAPGSNIYSTYPNSRYTSLSGTSMATPHVAGVAGLIRAANPDISVAQARQILRDTAQEAGSFTQYGYGIVDAHAAVVAASGGSGG

SEQ ID NO: 361 - DNA, 1239 bp, synthetic construct
  misc_feature 1..1239: note = Variant of serine peptidase from Bacillus sinesaloumensis
  source 1..1239: mol_type = other DNA
atggcagatcaagctagtcaagctaatggaaaccaggacgtcattgaaggcgagctgatcgtttcagtggaaccgaagaacggtaaacctgatgtgagcattcaaagtgcacaatccgtaacagggcaggaagacgtccttaaatcgaaaggctttacgatcgttgataccttgcatgtagaggatagcagcgtcaagccactcgtctcgaagaatttcaataagaaagtggtggagaagatgggactggtgtatcttgttcaatactctccggaccagtttaaaagttccaacattgcgaagaaagaactcagaaaagaattgatggatctgggctttaaagtccgctatataagcgaaaattacaagatgatggcgatcgaaattacagccactcttcaggcagtacaccctaaccaaaactggcattataatatgattaaagctccggaagcgtgggctattacgtctggatcctctagcgttaaagtagcagtcctggatacagggatcgaccataatcacccatccttggccaacttcgtgaatactaatcttggccggtcgtttgttggaggaaacaccatggatgttcaaggtcatggcacacatgttgctggcacgattgcatcttatgggagtgtaagcggagtgatgcagagtgcgacactgatcccggtcaaagtgctcgataattctggcagcgggtccctttacggtattacgcaaggcatattgtatgccgccgacatcgatgcggacgtcattaacatgtctctgggtggaggaggctataatcagagcatggatgaggctgttcaaacagcagttgctcagggaaccattgtagtagcagcgactggcaatgatggtgcatcgtcgatcagttatcctgctgcctacagcagcgtcattgcggtgggatctgtgacgtccaatcgtacacgatcctcgttttctaactatggatctgggcttgaagttatggcaccgggcagcaacatctacagtacgtatcctaattccagatatacatctttgagtggtacaagcatggctactccgcacgttgcgggcgtagctgggctcattcgcgcagccaacccagacatatctgtcgcgcaagcccgtcagattctgcgggataccgcgcaagaagcaggatcgttcacacagtacggctatggaatcgtcgatgctcatgccgccgttgttgctgcatccggtggtagcggcggc

SEQ ID NO: 362 - protein, 413 aa, synthetic construct
  REGION 1..413: note = Variant of serine peptidase from Bacillus sinesaloumensis
MADQASQANGNQDVIEGELIVSVEPKNGKPDVSIQSAQSVTGQEDVLKSKGFTIVDTLHVEDSSVKPLVSKNFNKKVVEKMGLVYLVQYSPDQFKSSNIAKKELRKELMDLGFKVRYISENYKMMAIEITATLQAVHPNQNWHYNMIKAPEAWAITSGSSSVKVAVLDTGIDHNHPSLANFVNTNLGRSFVGGNTMDVQGHGTHVAGTIASYGSVSGVMQSATLIPVKVLDNSGSGSLYGITQGILYAADIDADVINMSLGGGGYNQSMDEAVQTAVAQGTIVVAATGNDGASSISYPAAYSSVIAVGSVTSNRTRSSFSNYGSGLEVMAPGSNIYSTYPNSRYTSLSGTSMATPHVAGVAGLIRAANPDISVAQARQILRDTAQEAGSFTQYGYGIVDAHAAVVAASGGSGG

SEQ ID NO: 363 - DNA, 1239 bp, synthetic construct
  misc_feature 1..1239: note = Variant of serine peptidase from Bacillus sinesaloumensis
  source 1..1239: mol_type = other DNA
atggcagatcaagctagtcaagctaatggaaaccaggacgtcattgaaggcgagctgatcgtttcagtggaaccgaagaacggtaaacctgatgtgagcattcaaagtgcacaatccgtaacagggcaggaagacgtccttaaatcgaaaggctttacgatcgttgataccttgcatgtagaggatagcagcgtcaagccactcgtctcgaagaatttcaataagaaagtggtggagaagatgggactggtgtatcttgttcaatactctccggaccagtttaaaagttccaacattgcgaagaaagaactcagaaaagaattgatggatctgggctttaaagtccgctatataagcgaaaattacaagatgatggcgatcgaaggtacagccactcttcaggcagtacaccctaaccaaaactggcattataatatgattaaagctccggaagcgtgggctattacgtctggatcctctagcgttaaagtagcagtcctggatacagggatcgaccataatcacccatccttggccaacttcgtgaatcagaatcttggccggtcgtttgttggaggaaacaccatggatgttcaaggtcatggcacacatgttgctggcacgattgcatcttatgggagtgtaagcggagtgatgcagagtgcgacactgatcccggtcaaagtgctcgataattctggcagcgggtccctttacggtattacgcaaggcatattgtatgccgccgacatcgatgcggacgtcattaacatgtctctgggtggaggaggctataatcagagcatggatgaggctgttcaaacagcagttgctcagggaaccattgtagtagcagcgactggcaatgatggtgcatcgtcgatcagttatcctgctgcctacagcagcgtcattgcggtgggatctgtgacgtccaatcgtacacgatcctcgttttctaactatggatctgggcttgaagttatggcaccgggcagcaacatctacagtacgtatcctaattccagatatacatctttgagtggtacaagcatggctactccgcacgttgcgggcgtagctgggctcattcgcgcagccaacccagacatatctgtcgcgcaagcccgtcagattctgcgggataccgcgcaagaagcaggatcgttcacacagtacggctatggaatcgtcgatgctcatgccgccgttgttgctgcatccggtggtagcggcggc

SEQ ID NO: 364 - protein, 413 aa, synthetic construct
  REGION 1..413: note = Variant of serine peptidase from Bacillus sinesaloumensis
MADQASQANGNQDVIEGELIVSVEPKNGKPDVSIQSAQSVTGQEDVLKSKGFTIVDTLHVEDSSVKPLVSKNFNKKVVEKMGLVYLVQYSPDQFKSSNIAKKELRKELMDLGFKVRYISENYKMMAIEGTATLQAVHPNQNWHYNMIKAPEAWAITSGSSSVKVAVLDTGIDHNHPSLANFVNQNLGRSFVGGNTMDVQGHGTHVAGTIASYGSVSGVMQSATLIPVKVLDNSGSGSLYGITQGILYAADIDADVINMSLGGGGYNQSMDEAVQTAVAQGTIVVAATGNDGASSISYPAAYSSVIAVGSVTSNRTRSSFSNYGSGLEVMAPGSNIYSTYPNSRYTSLSGTSMATPHVAGVAGLIRAANPDISVAQARQILRDTAQEAGSFTQYGYGIVDAHAAVVAASGGSGG

SEQ ID NO: 365 - DNA, 1239 bp, synthetic construct
  misc_feature 1..1239: note = Variant of serine peptidase from Bacillus sinesaloumensis
  source 1..1239: mol_type = other DNA
atggcagatcaagctagtcaagctaatggaaaccaggacgtcattgaaggcgagctgatcgtttcagtggaaccgaagaacggtaaacctgatgtgagcattcaaagtgcacaatccgtaacagggcaggaagacgtccttaaatcgaaaggctttacgatcgttgataccttgcatgtagaggatagcagcgtcaagccactcgtctcgaagaatttcaataagaaagtggtggagaagatgggactggtgtatcttgttcaatactctccggaccagtttaaaagttccaacattgcgaagaaagaactcagaaaagaattgatggatctgggctttaaagtccgctatataagcgaaaattacaagatgatggcgatcgaaggtacagccactcttcaggcagtacaccctaaccaaaactggcattataatatgattaaagctccggaagcgtgggctattacgtctggatcctctagcgttaaagtagcagtcctggatacagggatcgaccataatcacccatccttggccaacttcgtgaatactaatcttggccggtcgtttgttatgggaaacaccatggatgttcaaggtcatggcacacatgttgctggcacgattgcatcttatgggagtgtaagcggagtgatgcagagtgcgacactgatcccggtcaaagtgctcgataattctggcagcgggtccctttacggtattacgcaaggcatattgtatgccgccgacatcgatgcggacgtcattaacatgtctctgggtggaggaggctataatcagagcatggatgaggctgttcaaacagcagttgctcagggaaccattgtagtagcagcgactggcaatgatggtgcatcgtcgatcagttatcctgctgcctacagcagcgtcattgcggtgggatctgtgacgtccaatcgtacacgatcctcgttttctaactatggatctgggcttgaagttatggcaccgggcagcaacatctacagtacgtatcctaattccagatatacatctttgagtggtacaagcatggctactccgcacgttgcgggcgtagctgggctcattcgcgcagccaacccagacatatctgtcgcgcaagcccgtcagattctgcgggataccgcgcaagaagcaggatcgttcacacagtacggctatggaatcgtcgatgctcatgccgccgttgttgctgcatccggtggtagcggcggc

SEQ ID NO: 366 - protein, 413 aa, synthetic construct
  REGION 1..413: note = Variant of serine peptidase from Bacillus sinesaloumensis
MADQASQANGNQDVIEGELIVSVEPKNGKPDVSIQSAQSVTGQEDVLKSKGFTIVDTLHVEDSSVKPLVSKNFNKKVVEKMGLVYLVQYSPDQFKSSNIAKKELRKELMDLGFKVRYISENYKMMAIEGTATLQAVHPNQNWHYNMIKAPEAWAITSGSSSVKVAVLDTGIDHNHPSLANFVNTNLGRSFVMGNTMDVQGHGTHVAGTIASYGSVSGVMQSATLIPVKVLDNSGSGSLYGITQGILYAADIDADVINMSLGGGGYNQSMDEAVQTAVAQGTIVVAATGNDGASSISYPAAYSSVIAVGSVTSNRTRSSFSNYGSGLEVMAPGSNIYSTYPNSRYTSLSGTSMATPHVAGVAGLIRAANPDISVAQARQILRDTAQEAGSFTQYGYGIVDAHAAVVAASGGSGG

SEQ ID NO: 367 - DNA, 1239 bp, synthetic construct
  misc_feature 1..1239: note = Variant of serine peptidase from Bacillus sinesaloumensis
  source 1..1239: mol_type = other DNA
atggcagatcaagctagtcaagctaatggaaaccaggacgtcattgaaggcgagctgatcgtttcagtggaaccgaagaacggtaaacctgatgtgagcattcaaagtgcacaatccgtaacagggcaggaagacgtccttaaatcgaaaggctttacgatcgttgataccttgcatgtagaggatagcagcgtcaagccactcgtctcgaagaatttcaataagaaagtggtggagaagatgggactggtgtatcttgttcaatactctccggaccagtttaaaagttccaacattgcgaagaaagaactcagaaaagaattgatggatctgggctttaaagtccgctatataagcgaaaattacaagatgatggcgatcgaaggtacagccactcttcaggcagtacaccctaaccaaaactggcattataatatgattaaagctccggaagcgtgggctattacgtctggatcctctagcgttaaagtagcagtcctggatacagggatcgaccataatcacccatccttggccaacttcgtgaatactaatcttggccggtcgtttgttggaggaaacaccatggatgttcaaggtcatggcacacatgttgctggcacgattgcatcttatgggagtgtaagcggagtgatgcagagtgcgacactgatcccggtcaaagtgctcgataattctggcagcgggtccctttacggtattacgcaaggcatattgtatgccgccgacatcgatgcggacgtcattaacatgtctctgggtggaggaggctataatcagagcatggatgaggctgttcaaacagcagttgctcagggaaccattgtagtagcagcgactggcaatgatggtgcatcgtcgatcagttatcctgctgcctacagcagcgtcattgcggtgggatctgtgacgtccaatcgtacacgatcctcgttttctaactatggatctgggcttgaagttatggcaccgggcagcaacatctacagtacgtatcctaattccagatatacatctttgagtggtacaagcatggctactccgcacgttgcgggcgtagctgggctcattcgcgcagccaacccagacatatctgtctctcaagcccgtcagattctgcgggataccgcgcaagaagcaggatcgttcacacagtacggctatggaatcgtcgatgctcatgccgccgttgttgctgcatccggtggtagcggcggc

SEQ ID NO: 368 - protein, 413 aa, synthetic construct
  REGION 1..413: note = Variant of serine peptidase from Bacillus sinesaloumensis
MADQASQANGNQDVIEGELIVSVEPKNGKPDVSIQSAQSVTGQEDVLKSKGFTIVDTLHVEDSSVKPLVSKNFNKKVVEKMGLVYLVQYSPDQFKSSNIAKKELRKELMDLGFKVRYISENYKMMAIEGTATLQAVHPNQNWHYNMIKAPEAWAITSGSSSVKVAVLDTGIDHNHPSLANFVNTNLGRSFVGGNTMDVQGHGTHVAGTIASYGSVSGVMQSATLIPVKVLDNSGSGSLYGITQGILYAADIDADVINMSLGGGGYNQSMDEAVQTAVAQGTIVVAATGNDGASSISYPAAYSSVIAVGSVTSNRTRSSFSNYGSGLEVMAPGSNIYSTYPNSRYTSLSGTSMATPHVAGVAGLIRAANPDISVSQARQILRDTAQEAGSFTQYGYGIVDAHAAVVAASGGSGG

SEQ ID NO: 369 - DNA, 1239 bp, synthetic construct
  misc_feature 1..1239: note = Variant of serine peptidase from Bacillus sinesaloumensis
  source 1..1239: mol_type = other DNA
atggcagatcaagctagtcaagctaatggaaaccaggacgtcattgaaggcgagctgatcgtttcagtggaaccgaagaacggtaaacctgatgtgagcattcaaagtgcacaatccgtaacagggcaggaagacgtccttaaatcgaaaggctttacgatcgttgataccttgcatgtagaggatagcagcgtcaagccactcgtctcgaagaatttcaataagaaagtggtggagaagatgggactggtgtatcttgttcaatactctccggaccagtttaaaagttccaacattgcgaagaaagaactcagaaaagaattgatggatctgggctttaaagtccgctatataagcgaaaattacaagatgatggcgatcgaaggtacagccactcttcaggcagtacaccccaaccaaaactggcattataatatgattaaagctccggaagcgtgggctattacgtctggatcctctagcgttaaagtagcagtcctggatacagggatcgaccataatcacccatccttggccaacttcgtgaatactaatcttggccggtcgtttgttggaggaaacaccatggatgttcaaggtcatggcacacatgttgctggcacgattgcatcttatgggagtgtaagcggagtgatgcagagtgcgacactgatcccggtcaaagtgctcgataattctggcagcgggtccctttacggtattacgcaaggcatattgtatgccgccgacatcgatgcggacgtcattaacatgtctctgggtggaggaggctataatcagagcatggatgaggctgttcaaacagcagttgctcagggaaccattgtagtagcagcgactggcaatgatggtgcatcgtcgatcagttatcctgctgcctacagcagcgtcattgcggtgggatctgtgacgtccaatcgtacacgatcctcgttttctaactatggatctgggcttgaagttatggcaccgggcagcaacatctacagtacgtatcctaattccagatatacatctttgagtggtacaagcatggctactccgcacgttgcgggcgtagctgggctcattcgcgcagccaacccatttatatctgtcgcgcaagcccgtcagattctgcgggataccgcgcaagaagcaggatcgttcacacagtacggctatggaatcgtcgatgctcatgccgccgttgttgctgcatccggtggtagcggcggc

SEQ ID NO: 370 - protein, 413 aa, synthetic construct
  REGION 1..413: note = Variant of serine peptidase from Bacillus sinesaloumensis
MADQASQANGNQDVIEGELIVSVEPKNGKPDVSIQSAQSVTGQEDVLKSKGFTIVDTLHVEDSSVKPLVSKNFNKKVVEKMGLVYLVQYSPDQFKSSNIAKKELRKELMDLGFKVRYISENYKMMAIEGTATLQAVHPNQNWHYNMIKAPEAWAITSGSSSVKVAVLDTGIDHNHPSLANFVNTNLGRSFVGGNTMDVQGHGTHVAGTIASYGSVSGVMQSATLIPVKVLDNSGSGSLYGITQGILYAADIDADVINMSLGGGGYNQSMDEAVQTAVAQGTIVVAATGNDGASSISYPAAYSSVIAVGSVTSNRTRSSFSNYGSGLEVMAPGSNIYSTYPNSRYTSLSGTSMATPHVAGVAGLIRAANPFISVAQARQILRDTAQEAGSFTQYGYGIVDAHAAVVAASGGSGG

SEQ ID NO: 371 - DNA, 1239 bp, synthetic construct
  misc_feature 1..1239: note = Variant of serine peptidase from Bacillus sinesaloumensis
  source 1..1239: mol_type = other DNA
atggcagatcaagctagtcaagctaatggaaaccaggacgtcattgaaggcgagctgatcgtttcagtggaaccgaagaacggtaaacctgatgtgagcattcaaagtgcacaatccgtaacagggcaggaagacgtccttaaatcgaaaggctttacgatcgttgataccttgcatgtagaggatagcagcgtcaagccactcgtctcgaagaatttcaataagaaagtggtggagaagatgggactggtgtatcttgttcaatactctccggaccagtttaaaagttccaacattgcgaagaaagaactcagaaaagaattgatggatctgggctttaaagtccgctatataagcgaaaattacaagatgatggcgatcgaaggtacagccactcttcaggcagtacaccctaaccaaaactggcattataatatgattaaagctccggaagcgtgggctattacgtctggatcctctagcgttaaagtagcagtcctggatacagggatcgaccataatcacccatccttggccaacttcgtgaatactaatcttggccggtcgtttgttggaggaaacaccatggatgttcaaggtcatggcacacatgttgctggcacgattgcatcttatgggagtgtaagcggagtgatgcagagtgcgacactgatcccggtcaaagtgctcgataattctggcagcgggtccctttacggtattacgcaaggcatattgtatgccgccgacatcgatgcggacgtcattaacatgtctctgggtggaggaggctataatgctagcatggatgaggctgttcaaacagcagttgctcagggaaccattgtagtagcagcgactggcaatgatggtgcatcgtcgatcagttatcctgctgcctacagcagcgtcattgcggtgggatctgtgacgtccaatcgtacacgatcctcgttttctaactatggatctgggcttgaagttatggcaccgggcagcaacatctacagtacgtatcctaattccagatatacatctttgagtggtacaagcatggctactccgcacgttgcgggcgtagctgggctcattcgcgcagccaacccagacatatctgtcgcgcaagcccgtcagattctgcgggataccgcgcaagaagcaggatcgttcacacagtacggctatggaatcgtcgatgctcatgccgccgttgttgctgcatccggtggtagcggcggc

SEQ ID NO: 372 - protein, 413 aa, synthetic construct
  REGION 1..413: note = Variant of serine peptidase from Bacillus sinesaloumensis
MADQASQANGNQDVIEGELIVSVEPKNGKPDVSIQSAQSVTGQEDVLKSKGFTIVDTLHVEDSSVKPLVSKNFNKKVVEKMGLVYLVQYSPDQFKSSNIAKKELRKELMDLGFKVRYISENYKMMAIEGTATLQAVHPNQNWHYNMIKAPEAWAITSGSSSVKVAVLDTGIDHNHPSLANFVNTNLGRSFVGGNTMDVQGHGTHVAGTIASYGSVSGVMQSATLIPVKVLDNSGSGSLYGITQGILYAADIDADVINMSLGGGGYNASMDEAVQTAVAQGTIVVAATGNDGASSISYPAAYSSVIAVGSVTSNRTRSSFSNYGSGLEVMAPGSNIYSTYPNSRYTSLSGTSMATPHVAGVAGLIRAANPDISVAQARQILRDTAQEAGSFTQYGYGIVDAHAAVVAASGGSGG

SEQ ID NO: 373 - DNA, 1239 bp, synthetic construct
  misc_feature 1..1239: note = Variant of serine peptidase from Bacillus sinesaloumensis
  source 1..1239: mol_type = other DNA
atggcagatcaagctagtcaagctaatggaaaccaggacgtcattgaaggcgagctgatcgtttcagtggaaccgaagaacggtaaacctgatgtgagcattcaaagtgcacaatccgtaacagggcaggaagacgtccttaaatcgaaaggctttacgatcgttgataccttgcatgtagaggatagcagcgtcaagccactcgtctcgaagaatttcaataagaaagtggtggagaagatgggactggtgtatcttgttcaatactctccggaccagtttaaaagttccaacattgcgaagaaagaactcagaaaagaattgatggatctgggctttaaagtccgctatataagcgaaaattacaagatgatggcgatcgaaggtacagccactcttcaggcagtacaccctaaccaaaactggcattataatatgattaaagctccggaagcgtgggctattacgtctggatcctctagcgttaaagtagcagtcctggatacagggatcgaccataatcacccatccttggccaacttcgtgaatactaatcttggccggtcgtttgttggaggaaacaccatggatgttcaaggtcatggcacacatgttgctggcacgattgcatcttatgggagtgtaagcggagtgatgcagagtgcgacactgatcccggtcaaagtgctcgataattctggcagcgggtccctttacggtattacgcaaggcatattgtatgccgccgacatcgatgcggacgtcattaacatgtctctgggtggaggaggctataatcagagcatggatgaggctgttcaaacagcagttgctcagggaaccattgtagtagcagcgactggcaatgatggtgcatcgtcgatcagttatcctgctgcctacagcagcgtcattgcggtgggatctgtgacgtccaatcgtacacgatcctcgttttctaactatggatctgggcttgaagttatggcaccgggcagcaacatctacagtacgtatcctaattccagatatacatctttgagtggtacaagcatggctactccgcacgttgcgggcgtagctgggctcattcgcgcagccaactgggacatatctgtcgcgcaagcccgtcagattctgcgggataccgcgcaagaagcaggatcgttcacacagtacggctatggaatcgtcgatgctcatgccgccgttgttgctgcatccggtggtagcggcggc

SEQ ID NO: 374 - protein, 413 aa, synthetic construct
  REGION 1..413: note = Variant of serine peptidase from Bacillus sinesaloumensis
MADQASQANGNQDVIEGELIVSVEPKNGKPDVSIQSAQSVTGQEDVLKSKGFTIVDTLHVEDSSVKPLVSKNFNKKVVEKMGLVYLVQYSPDQFKSSNIAKKELRKELMDLGFKVRYISENYKMMAIEGTATLQAVHPNQNWHYNMIKAPEAWAITSGSSSVKVAVLDTGIDHNHPSLANFVNTNLGRSFVGGNTMDVQGHGTHVAGTIASYGSVSGVMQSATLIPVKVLDNSGSGSLYGITQGILYAADIDADVINMSLGGGGYNQSMDEAVQTAVAQGTIVVAATGNDGASSISYPAAYSSVIAVGSVTSNRTRSSFSNYGSGLEVMAPGSNIYSTYPNSRYTSLSGTSMATPHVAGVAGLIRAANWDISVAQARQILRDTAQEAGSFTQYGYGIVDAHAAVVAASGGSGG

SEQ ID NO: 375 - DNA, 1239 bp, synthetic construct
  misc_feature 1..1239: note = Variant of serine peptidase from Bacillus sinesaloumensis
  source 1..1239: mol_type = other DNA
atggcagatcaagctagtcaagctaatggaaaccaggacgtcattgaaggcgagctgatcgtttcagtggaaccgaagaacggtaaacctgatgtgagcattcaaagtgcacaatccgtaacagggcaggaagacgtccttaaatcgaaaggctttacgatcgttgataccttgcatgtagaggatagcagcgtcaagccactcgtctcgaagaatttcaataagaaagtggtggagaagatgggactggtgtatcttgttcaatactctccggaccagtttaaaagttccaacattgcgaagaaagaactcagaaaagaattgatggatctgggctttaaagtccgctatataagcgaaaattacaagatgatggcgatcgaaggtacagccactcttcaggcagtacaccctaaccaaaactggcattataatatgattaaagctccggaagcgtgggctattacgtctggatcctctagcgttaaagtagcagtcctggatacagggatcgaccataatcacccatccttggccaacttcgtgaatactaatcttggccggtcgtttgttggaggaaacaccatggatgttctgggtcatggcacacatgttgctggcacgattgcatcttatgggagtgtaagcggagtgatgcagagtgcgacactgatcccggtcaaagtgctcgataattctggcagcgggtccctttacggtattacgcaaggcatattgtatgccgccgacatcgatgcggacgtcattaacatgtctctgggtggaggaggctataatcagagcatggatgaggctgttcaaacagcagttgctcagggaaccattgtagtagcagcgactggcaatgatggtgcatcgtcgatcagttatcctgctgcctacagcagcgtcattgcggtgggatctgtgacgtccaatcgtacacgatcctcgttttctaactatggatctgggcttgaagttatggcaccgggcagcaacatctacagtacgtatcctaattccagatatacatctttgagtggtacaagcatggctactccgcacgttgcgggcgtagctgggctcattcgcgcagccaacccagacatatctgtcgcgcaagcccgtcagattctgcgggataccgcgcaagaagcaggatcgttcacacagtacggctatggaatcgtcgatgctcatgccgccgttgttgctgcatccggtggtagcggcggc

SEQ ID NO: 376 - protein, 413 aa, synthetic construct
  REGION 1..413: note = Variant of serine peptidase from Bacillus sinesaloumensis
MADQASQANGNQDVIEGELIVSVEPKNGKPDVSIQSAQSVTGQEDVLKSKGFTIVDTLHVEDSSVKPLVSKNFNKKVVEKMGLVYLVQYSPDQFKSSNIAKKELRKELMDLGFKVRYISENYKMMAIEGTATLQAVHPNQNWHYNMIKAPEAWAITSGSSSVKVAVLDTGIDHNHPSLANFVNTNLGRSFVGGNTMDVLGHGTHVAGTIASYGSVSGVMQSATLIPVKVLDNSGSGSLYGITQGILYAADIDADVINMSLGGGGYNQSMDEAVQTAVAQGTIVVAATGNDGASSISYPAAYSSVIAVGSVTSNRTRSSFSNYGSGLEVMAPGSNIYSTYPNSRYTSLSGTSMATPHVAGVAGLIRAANPDISVAQARQILRDTAQEAGSFTQYGYGIVDAHAAVVAASGGSGG

SEQ ID NO: 377 - DNA, 1239 bp, synthetic construct
  misc_feature 1..1239: note = Variant of serine peptidase from Bacillus sinesaloumensis
  source 1..1239: mol_type = other DNA
atggcagatcaagctagtcaagctaatggaaaccaggacgtcattgaaggcgagctgatcgtttcagtggaaccgaagaacggtaaacctgatgtgagcattcaaagtgcacaatccgtaacagggcaggaagacgtccttaaatcgaaaggctttacgatcgttgataccttgcatgtagaggatagcagcgtcaagccactcgtctcgaagaatttcaataagaaagtggtggagaagatgggactggtgtatcttgttcaatactctccggaccagtttaaaagttccaacattgcgaagaaagaactcagaaaagaattgatggatctgggctttaaagtccgctatataagcgaaaattacaagatgatggcgatcgaaggtacagccactcttcaggcagtacaccctaaccaaaactggcattatatgatgattaaagctccggaagcgtgggctattacgtctggatcctctagcgttaaagtagcagtcctggatacagggatcgaccataatcacccatccttggccaacttcgtgaatactaatcttggccggtcgtttgttggaggaaacaccatggatgttcaaggtcatggcacacatgttgctggcacgattgcatcttatgggagtgtaagcggagtgatgcagagtgcgacactgatcccggtcaaagtgctcgataattctggcagcgggtccctttacggtattacgcaaggcatattgtatgccgccgacatcgatgcggacgtcattaacatgtctctgggtggaggaggctataatcagagcatggatgaggctgttcaaacagcagttgctcagggaaccattgtagtagcagcgactggcaatgatggtgcatcgtcgatcagttatcctgctgcctacagcagcgtcattgcggtgggatctgtgacgtccaatcgtacacgatcctcgttttctaactatggatctgggcttgaagttatggcaccgggcagcaacatctacagtacgtatcctaattccagatatacatctttgagtggtacaagcatggctactccgcacgttgcgggcgtagctgggctcattcgcgcagccaacccagacatatctgtcgcgcaagcccgtcagattctgcgggataccgcgcaagaagcaggatcgttcacacagtacggctatggaatcgtcgatgctcatgccgccgttgttgctgcatccggtggtagcggcggc

SEQ ID NO: 378 - protein, 413 aa, synthetic construct
  REGION 1..413: note = Variant of serine peptidase from Bacillus sinesaloumensis
MADQASQANGNQDVIEGELIVSVEPKNGKPDVSIQSAQSVTGQEDVLKSKGFTIVDTLHVEDSSVKPLVSKNFNKKVVEKMGLVYLVQYSPDQFKSSNIAKKELRKELMDLGFKVRYISENYKMMAIEGTATLQAVHPNQNWHYMMIKAPEAWAITSGSSSVKVAVLDTGIDHNHPSLANFVNTNLGRSFVGGNTMDVQGHGTHVAGTIASYGSVSGVMQSATLIPVKVLDNSGSGSLYGITQGILYAADIDADVINMSLGGGGYNQSMDEAVQTAVAQGTIVVAATGNDGASSISYPAAYSSVIAVGSVTSNRTRSSFSNYGSGLEVMAPGSNIYSTYPNSRYTSLSGTSMATPHVAGVAGLIRAANPDISVAQARQILRDTAQEAGSFTQYGYGIVDAHAAVVAASGGSGG

SEQ ID NO: 379 - DNA, 1239 bp, synthetic construct
  misc_feature 1..1239: note = Variant of serine peptidase from Bacillus sinesaloumensis
  source 1..1239: mol_type = other DNA
atggcagatcaagctagtcaagctaatggaaaccaggacgtcattgaaggcgagctgatcgtttcagtggaaccgaagaacggtaaacctgatgtgagcattcaaagtgcacaatccgtaacagggcaggaagacgtccttaaatcgaaaggctttacgatcgttgataccttgcatgtagaggatagcagcgtcaagccactcgtctcgaagaatttcaataagaaagtggtggagaagatgggactggtgtatcttgttcaatactctccggaccagtttaaaagttccaacattgcgaagaaagaactcagaaaagaattgatggatctgggctttaaagtccgctatataagcgaaaattacaagatgatggcgatcgaaggtacagccactcttcaggcagtacaccctaaccaaaactggcattataatatgattaaagctccggaagcgtgggctattacgtctggatcctctagcgttaaagtagcagtcctggatacagggatcgaccataatcacccatccttggccaacttcgtgaatactaatcttggccggtcgtttgttggaggagctaccatggatgttcaaggtcatggcacacatgttgctggcacgattgcatcttatgggagtgtaagcggagtgatgcagagtgcgacactgatcccggtcaaagtgctcgataattctggcagcgggtccctttacggtattacgcaaggcatattgtatgccgccgacatcgatgcggacgtcattaacatgtctctgggtggaggaggctataatcagagcatggatgaggctgttcaaacagcagttgctcagggaaccattgtagtagcagcgactggcaatgatggtgcatcgtcgatcagttatcctgctgcctacagcagcgtcattgcggtgggatctgtgacgtccaatcgtacacgatcctcgttttctaactatggatctgggcttgaagttatggcaccgggcagcaacatctacagtacgtatcctaattccagatatacatctttgagtggtacaagcatggctactccgcacgttgcgggcgtagctgggctcattcgcgcagccaacccagacatatctgtcgcgcaagcccgtcagattctgcgggataccgcgcaagaagcaggatcgttcacacagtacggctatggaatcgtcgatgctcatgccgccgttgttgctgcatccggtggtagcggcggc

SEQ ID NO: 380 - protein, 413 aa, synthetic construct
  REGION 1..413: note = Variant of serine peptidase from Bacillus sinesaloumensis
MADQASQANGNQDVIEGELIVSVEPKNGKPDVSIQSAQSVTGQEDVLKSKGFTIVDTLHVEDSSVKPLVSKNFNKKVVEKMGLVYLVQYSPDQFKSSNIAKKELRKELMDLGFKVRYISENYKMMAIEGTATLQAVHPNQNWHYNMIKAPEAWAITSGSSSVKVAVLDTGIDHNHPSLANFVNTNLGRSFVGGATMDVQGHGTHVAGTIASYGSVSGVMQSATLIPVKVLDNSGSGSLYGITQGILYAADIDADVINMSLGGGGYNQSMDEAVQTAVAQGTIVVAATGNDGASSISYPAAYSSVIAVGSVTSNRTRSSFSNYGSGLEVMAPGSNIYSTYPNSRYTSLSGTSMATPHVAGVAGLIRAANPDISVAQARQILRDTAQEAGSFTQYGYGIVDAHAAVVAASGGSGG

SEQ ID NO: 381 - DNA, 1239 bp, synthetic construct
  misc_feature 1..1239: note = Variant of serine peptidase from Bacillus sinesaloumensis
  source 1..1239: mol_type = other DNA
atggcagatcaagctagtcaagctaatggaaaccaggacgtcattgaaggcgagctgatcgtttcagtggaaccgaagaacggtaaacctgatgtgagcattcaaagtgcacaatccgtaacagggcaggaagacgtccttaaatcgaaaggctttacgatcgttgataccttgcatgtagaggatagcagcgtcaagccactcgtctcgaagaatttcaataagaaagtggtggagaagatgggactggtgtatcttgttcaatactctccggaccagtttaaaagttccaacattgcgaagaaagaactcagaaaagaattgatggatctgggctttaaagtccgctatataagcgaaaattacaagatgatggcgatcgaaggtacagccactcttcaggcagtacaccctaaccaaaactggcattataatatgattaaagctccggaagcgtgggctattacgtctggatcctctagcgttaaagtagcagtcctggatacagggatcgaccataatcacccatccttggccaacttcgtgaatactagtcttggccggtcgtttgttggaggaaacaccatggatgttcaaggtcatggcacacatgttgctggcacgattgcatcttatgggagtgtaagcggagtgatgcagagtgcgacactgatcccggtcaaagtgctcgataattctggcagcgggtccctttacggtattacgcaaggcatattgtatgccgccgacatcgatgcggacgtcattaacatgtctctgggtggaggaggctataatcagagcatggatgaggctgttcaaacagcagttgctcagggaaccattgtagtagcagcgactggcaatgatggtgcatcgtcgatcagttatcctgctgcctacagcagcgtcattgcggtgggatctgtgacgtccaatcgtacacgatcctcgttttctaactatggatctgggcttgaagttatggcaccgggcagcaacatctacagtacgtatcctaattccagatatacatctttgagtggtacaagcatggctactccgcacgttgcgggcgtagctgggctcattcgcgcagccaacccagacatatctgtcgcgcaagcccgtcagattctgcgggataccgcgcaagaagcaggatcgttcacacagtacggctatggaatcgtcgatgctcatgccgccgttgttgctgcatccggtggtagcggcggc

SEQ ID NO: 382 - protein, 413 aa, synthetic construct
  REGION 1..413: note = Variant of serine peptidase from Bacillus sinesaloumensis
MADQASQANGNQDVIEGELIVSVEPKNGKPDVSIQSAQSVTGQEDVLKSKGFTIVDTLHVEDSSVKPLVSKNFNKKVVEKMGLVYLVQYSPDQFKSSNIAKKELRKELMDLGFKVRYISENYKMMAIEGTATLQAVHPNQNWHYNMIKAPEAWAITSGSSSVKVAVLDTGIDHNHPSLANFVNTSLGRSFVGGNTMDVQGHGTHVAGTIASYGSVSGVMQSATLIPVKVLDNSGSGSLYGITQGILYAADIDADVINMSLGGGGYNQSMDEAVQTAVAQGTIVVAATGNDGASSISYPAAYSSVIAVGSVTSNRTRSSFSNYGSGLEVMAPGSNIYSTYPNSRYTSLSGTSMATPHVAGVAGLIRAANPDISVAQARQILRDTAQEAGSFTQYGYGIVDAHAAVVAASGGSGG

SEQ ID NO: 383 - DNA, 1239 bp, synthetic construct
  misc_feature 1..1239: note = Variant of serine peptidase from Bacillus sinesaloumensis
  source 1..1239: mol_type = other DNA
atggcagatcaagctagtcaagctaatggaaaccaggacgtcattgaaggcgagctgatcgtttcagtggaaccgaagaacggtaaacctgatgtgagcattcaaagtgcacaatccgtaacagggcaggaagacgtccttaaatcgaaaggctttacgatcgttgataccttgcatgtagaggatagcagcgtcaagccactcgtctcgaagaatttcaataagaaagtggtggagaagatgggactggtgtatcttgttcaatactctccggaccagtttaaaagttccaacattgcgaagaaagaactcagaaaagaattgatggatctgggctttaaagtccgctatataagcgaaaattacaagatgatggcgatcgaaggtacagccactcttcaggcagtacaccctaaccaaaactggcattataatatgattaaagctccggaagcgtgggctattacgtctggatcctctagcgttaaagtagcagtcctggatacagggatcgaccataatcacccatccttggccaacttcgtgaatactaatcttggccggtcgtttgttggaggaaacaccatggatgttcaaggtcatggcacacatgttgctggcacgattgcatcttatgggagtgtaagcggagtgatgcagagtgcgacactgatcccggtcaaagtgctcgataattctggcagcgggtccctttacggtattacgcaaggcatattgtatgccgccgacatcgatgcggacgtcattaacatgtctctgggtggaggaggccgtaatcagagcatggatgaggctgttcaaacagcagttgctcagggaaccattgtagtagcagcgactggcaatgatggtgcatcgtcgatcagttatcctgctgcctacagcagcgtcattgcggtgggatctgtgacgtccaatcgtacacgatcctcgttttctaactatggatctgggcttgaagttatggcaccgggcagcaacatctacagtacgtatcctaattccagatatacatctttgagtggtacaagcatggctactccgcacgttgcgggcgtagctgggctcattcgcgcagccaacccagacatatctgtcgcgcaagcccgtcagattctgcgggataccgcgcaagaagcaggatcgttcacacagtacggctatggaatcgtcgatgctcatgccgccgttgttgctgcatccggtggtagcggcggc

SEQ ID NO: 384 - protein, 413 aa, synthetic construct
  REGION 1..413: note = Variant of serine peptidase from Bacillus sinesaloumensis
MADQASQANGNQDVIEGELIVSVEPKNGKPDVSIQSAQSVTGQEDVLKSKGFTIVDTLHVEDSSVKPLVSKNFNKKVVEKMGLVYLVQYSPDQFKSSNIAKKELRKELMDLGFKVRYISENYKMMAIEGTATLQAVHPNQNWHYNMIKAPEAWAITSGSSSVKVAVLDTGIDHNHPSLANFVNTNLGRSFVGGNTMDVQGHGTHVAGTIASYGSVSGVMQSATLIPVKVLDNSGSGSLYGITQGILYAADIDADVINMSLGGGGRNQSMDEAVQTAVAQGTIVVAATGNDGASSISYPAAYSSVIAVGSVTSNRTRSSFSNYGSGLEVMAPGSNIYSTYPNSRYTSLSGTSMATPHVAGVAGLIRAANPDISVAQARQILRDTAQEAGSFTQYGYGIVDAHAAVVAASGGSGG

SEQ ID NO: 385 - DNA, 1239 bp, synthetic construct
  misc_feature 1..1239: note = Variant of serine peptidase from Bacillus sinesaloumensis
  source 1..1239: mol_type = other DNA
atggcagatcaagctagtcaagctaatggaaaccaggacgtcattgaaggcgagctgatcgtttcagtggaaccgaagaacggtaaacctgatgtgagcattcaaagtgcacaatccgtaacagggcaggaagacgtccttaaatcgaaaggctttacgatcgttgataccttgcatgtagaggatagcagcgtcaagccactcgtctcgaagaatttcaataagaaagtggtggagaagatgggactggtgtatcttgttcaatactctccggaccagtttaaaagttccaacattgcgaagaaagaactcagaaaagaattgatggatctgggctttaaagtccgctatataagcgaaaattacaagatgatggcgatcgaaagtacagccactcttcaggcagtacaccctaaccaaaactggcattataatatgattaaagctccggaagcgtgggctattacgtctggatcctctagcgttaaagtagcagtcctggatacagggatcgaccataatcacccatccttggccaacttcgtgaatactaatcttggccggtcgtttgttggaggaaacaccatggatgttcaaggtcatggcacacatgttgctggcacgattgcatcttatgggagtgtaagcggagtgatgcagagtgcgacactgatcccggtcaaagtgctcgataattctggcagcgggtccctttacggtattacgcaaggcatattgtatgccgccgacatcgatgcggacgtcattaacatgtctctgggtggaggaggctataatcagagcatggatgaggctgttcaaacagcagttgctcagggaaccattgtagtagcagcgactggcaatgatggtgcatcgtcgatcagttatcctgctgcctacagcagcgtcattgcggtgggatctgtgacgtccaatcgtacacgatcctcgttttctaactatggatctgggcttgaagttatggcaccgggcagcaacatctacagtacgtatcctaattccagatatacatctttgagtggtacaagcatggctactccgcacgttgcgggcgtagctgggctcattcgcgcagccaacccagacatatctgtcgcgcaagcccgtcagattctgcgggataccgcgcaagaagcaggatcgttcacacagtacggctatggaatcgtcgatgctcatgccgccgttgttgctgcatccggtggtagcggcggc

SEQ ID NO: 386 - protein, 413 aa, synthetic construct
  REGION 1..413: note = Variant of serine peptidase from Bacillus sinesaloumensis
MADQASQANGNQDVIEGELIVSVEPKNGKPDVSIQSAQSVTGQEDVLKSKGFTIVDTLHVEDSSVKPLVSKNFNKKVVEKMGLVYLVQYSPDQFKSSNIAKKELRKELMDLGFKVRYISENYKMMAIESTATLQAVHPNQNWHYNMIKAPEAWAITSGSSSVKVAVLDTGIDHNHPSLANFVNTNLGRSFVGGNTMDVQGHGTHVAGTIASYGSVSGVMQSATLIPVKVLDNSGSGSLYGITQGILYAADIDADVINMSLGGGGYNQSMDEAVQTAVAQGTIVVAATGNDGASSISYPAAYSSVIAVGSVTSNRTRSSFSNYGSGLEVMAPGSNIYSTYPNSRYTSLSGTSMATPHVAGVAGLIRAANPDISVAQARQILRDTAQEAGSFTQYGYGIVDAHAAVVAASGGSGG

SEQ ID NO: 387 - DNA, 1239 bp, synthetic construct
  misc_feature 1..1239: note = Variant of serine peptidase from Bacillus sinesaloumensis
  source 1..1239: mol_type = other DNA
atggcagatcaagctagtcaagctaatggaaaccaggacgtcattgaaggcgagctgatcgtttcagtggaaccgaagaacggtaaacctgatgtgagcattcaaagtgcacaatccgtaacagggcaggaagacgtccttaaatcgaaaggctttacgatcgttgataccttgcatgtagaggatagcagcgtcaagccactcgtctcgaagaatttcaataagaaagtggtggagaagatgggactggtgtatcttgttcaatactctccggaccagtttaaaagttccaacattgcgaagaaagaactcagaaaagaattgatggatctgggctttaaagtccgctatataagcgaaaattacaagatgatggcgatcgaaggtacagccactcttcaggcagtacaccctaaccaaaactggcattataatatgattaaagctccggaagcgtgggctattacgtctggatcctctagcgttaaagtagcagtcctggatacagggatcgaccataatcacccatccttggccaacttcgtgaatactcgtcttggccggtcgtttgttggaggaaacaccatggatgttcaaggtcatggcacacatgttgctggcacgattgcatcttatgggagtgtaagcggagtgatgcagagtgcgacactgatcccggtcaaagtgctcgataattctggcagcgggtccctttacggtattacgcaaggcatattgtatgccgccgacatcgatgcggacgtcattaacatgtctctgggtggaggaggctataatcagagcatggatgaggctgttcaaacagcagttgctcagggaaccattgtagtagcagcgactggcaatgatggtgcatcgtcgatcagttatcctgctgcctacagcagcgtcattgcggtgggatctgtgacgtccaatcgtacacgatcctcgttttctaactatggatctgggcttgaagttatggcaccgggcagcaacatctacagtacgtatcctaattccagatatacatctttgagtggtacaagcatggctactccgcacgttgcgggcgtagctgggctcattcgcgcagccaacccagacatatctgtcgcgcaagcccgtcagattctgcgggataccgcgcaagaagcaggatcgttcacacagtacggctatggaatcgtcgatgctcatgccgccgttgttgctgcatccggtggtagcggcggc

SEQ ID NO: 388 - protein, 413 aa, synthetic construct
  REGION 1..413: note = Variant of serine peptidase from Bacillus sinesaloumensis
MADQASQANGNQDVIEGELIVSVEPKNGKPDVSIQSAQSVTGQEDVLKSKGFTIVDTLHVEDSSVKPLVSKNFNKKVVEKMGLVYLVQYSPDQFKSSNIAKKELRKELMDLGFKVRYISENYKMMAIEGTATLQAVHPNQNWHYNMIKAPEAWAITSGSSSVKVAVLDTGIDHNHPSLANFVNTRLGRSFVGGNTMDVQGHGTHVAGTIASYGSVSGVMQSATLIPVKVLDNSGSGSLYGITQGILYAADIDADVINMSLGGGGYNQSMDEAVQTAVAQGTIVVAATGNDGASSISYPAAYSSVIAVGSVTSNRTRSSFSNYGSGLEVMAPGSNIYSTYPNSRYTSLSGTSMATPHVAGVAGLIRAANPDISVAQARQILRDTAQEAGSFTQYGYGIVDAHAAVVAASGGSGG

SEQ ID NO: 389 - DNA, 1239 bp, synthetic construct
  misc_feature 1..1239: note = Variant of serine peptidase from Bacillus sinesaloumensis
  source 1..1239: mol_type = other DNA
atggcagatcaagctagtcaagctaatggaaaccaggacgtcattgaaggcgagctgatcgtttcagtggaaccgaagaacggtaaacctgatgtgagcattcaaagtgcacaatccgtaacagggcaggaagacgtccttaaatcgaaaggctttacgatcgttgataccttgcatgtagaggatagcagcgtcaagccactcgtctcgaagaatttcaataagaaagtggtggagaagatgggactggtgtatcttgttcaatactctccggaccagtttaaaagttccaacattgcgaagaaagaactcagaaaagaattgatggatctgggctttaaagtccgctatataagcgaaaattacaagatgatggcgatcgaaggtacagccactcttcaggcagtacaccctaaccaaaactggcattataatatgattaaagctccggaagcgtgggctattacgtctggatcctctagcgttaaagtagcagtcctggatacagggatcgaccataatcacccatccttggccaacttcgtgaatactaatcttggctggtcgtttgttggaggaaacaccatggatgttcaaggtcatggcacacatgttgctggcacgattgcatcttatgggagtgtaagcggagtgatgcagagtgcgacactgatcccggtcaaagtgctcgataattctggcagcgggtccctttacggtattacgcaaggcatattgtatgccgccgacatcgatgcggacgtcattaacatgtctctgggtggaggaggctataatcagagcatggatgaggctgttcaaacagcagttgctcagggaaccattgtagtagcagcgactggcaatgatggtgcatcgtcgatcagttatcctgctgcctacagcagcgtcattgcggtgggatctgtgacgtccaatcgtacacgatcctcgttttctaactatggatctgggcttgaagttatggcaccgggcagcaacatctacagtacgtatcctaattccagatatacatctttgagtggtacaagcatggctactccgcacgttgcgggcgtagctgggctcattcgcgcagccaacccagacatatctgtcgcgcaagcccgtcagattctgcgggataccgcgcaagaagcaggatcgttcacacagtacggctatggaatcgtcgatgctcatgccgccgttgttgctgcatccggtggtagcggcggc

SEQ ID NO: 390 - protein, 413 aa, synthetic construct
  REGION 1..413: note = Variant of serine peptidase from Bacillus sinesaloumensis
MADQASQANGNQDVIEGELIVSVEPKNGKPDVSIQSAQSVTGQEDVLKSKGFTIVDTLHVEDSSVKPLVSKNFNKKVVEKMGLVYLVQYSPDQFKSSNIAKKELRKELMDLGFKVRYISENYKMMAIEGTATLQAVHPNQNWHYNMIKAPEAWAITSGSSSVKVAVLDTGIDHNHPSLANFVNTNLGWSFVGGNTMDVQGHGTHVAGTIASYGSVSGVMQSATLIPVKVLDNSGSGSLYGITQGILYAADIDADVINMSLGGGGYNQSMDEAVQTAVAQGTIVVAATGNDGASSISYPAAYSSVIAVGSVTSNRTRSSFSNYGSGLEVMAPGSNIYSTYPNSRYTSLSGTSMATPHVAGVAGLIRAANPDISVAQARQILRDTAQEAGSFTQYGYGIVDAHAAVVAASGGSGG

SEQ ID NO: 391 - DNA, 1239 bp, synthetic construct
  misc_feature 1..1239: note = Variant of serine peptidase from Bacillus sinesaloumensis
  source 1..1239: mol_type = other DNA
atggcagatcaagctagtcaagctaatggaaaccaggacgtcattgaaggcgagctgatcgtttcagtggaaccgaagaacggtaaacctgatgtgagcattcaaagtgcacaatccgtaacagggcaggaagacgtccttaaatcgaaaggctttacgatcgttgataccttgcatgtagaggatagcagcgtcaagccactcgtctcgaagaatttcaataagaaagtggtggagaagatgggactggtgtatcttgttcaatactctccggaccagtttaaaagttccaacattgcgaagaaagaactcagaaaagaattgatggatctgggctttaaagtccgctatataagcgaaaattacaagatgatggcgatcgaaggtacagccactcttcaggcagtacaccctaaccaaaactggcattataatatgattaaagctccggaagcgtgggctattacgtctggatcctctggcgttaaagtagcagtcctggatacagggatcgaccataatcacccatccttggccaacttcgtgaatactaatcttggccggtcgtttgttggaggtaacaccatggatgttcaaggtcatggcacacatgttgctggcacgattgcatcttatgggagtgtaagcggagtgatgcagagtgcgacactgatcccggtcaaagtgctcgataattctggcagcgggtccctttacggtattacgcaaggcatattgtatgccgccgacatcgatgcggacgtcattaacatgtctctgggtggaggaggctataatcagagcatggatgaggctgttcaaacagcagttgcgcagggaaccattgtagtagcagcgactggcaatgatggtgcatcgtcgatcagttatcctgctgcctacagcagcgtcattgcggtgggatctgtgacgtccaatcgtacacgatcctcgttttctaactatggatctgggcttgaagttatggcaccgggcagcaacatctacagtacgtatcctaattccagatatacatctttgagtggtacaagcatggctactccgcacgttgcgggcgtagctgggctcattcgcgcagccaacccagacatatctgtcgcgcaagcccgtcagattctgcgggataccgcgcaagaagcaggatcgttcacacagtacggctatggaatcgtcgatgctcatgccgccgttgtggctgcatccggtggtagcggcggc

SEQ ID NO: 392 - protein, 413 aa, synthetic construct
  REGION 1..413: note = Variant of serine peptidase from Bacillus sinesaloumensis
MADQASQANGNQDVIEGELIVSVEPKNGKPDVSIQSAQSVTGQEDVLKSKGFTIVDTLHVEDSSVKPLVSKNFNKKVVEKMGLVYLVQYSPDQFKSSNIAKKELRKELMDLGFKVRYISENYKMMAIEGTATLQAVHPNQNWHYNMIKAPEAWAITSGSSGVKVAVLDTGIDHNHPSLANFVNTNLGRSFVGGNTMDVQGHGTHVAGTIASYGSVSGVMQSATLIPVKVLDNSGSGSLYGITQGILYAADIDADVINMSLGGGGYNQSMDEAVQTAVAQGTIVVAATGNDGASSISYPAAYSSVIAVGSVTSNRTRSSFSNYGSGLEVMAPGSNIYSTYPNSRYTSLSGTSMATPHVAGVAGLIRAANPDISVAQARQILRDTAQEAGSFTQYGYGIVDAHAAVVAASGGSGG

SEQ ID NO: 393 - DNA, 1239 bp, synthetic construct
  misc_feature 1..1239: note = Variant of serine peptidase from Bacillus sinesaloumensis
  source 1..1239: mol_type = other DNA
atggcagatcaagctagtcaagctaatggaaaccaggacgtcattgaaggcgagctgatcgtttcagtggaaccgaagaacggtaaacctgatgtgagcattcaaagtgcacaatccgtaacagggcaggaagacgtccttaaatcgaaaggctttacgatcgttgataccttgcatgtagaggatagcagcgtcaagccactcgtctcgaagaatttcaataagaaagtggtggagaagatgggactggtgtatcttgttcaatactctccggaccagtttaaaagttccaacattgcgaagaaagaactcagaaaagaattgatggatctgggctttaaagtccgctatataagcgaaaattacaagatgatggcgatcgaaggtacagccactcttcaggcagtacaccctaaccaaaactggcattataatatgattaaagctccggaagcgtgggctattacgtctggatcctctagcgttaaagtagcagtcctggatacagggatcgaccataatcacccatccttggccaacttcgtgaatactaatctgggccggtcgtttgttggaggaaacaccatggatgttcaaggtcatggcacacatgttgctggcacgattgcatcttatgggagtgtaagcggagtgatgcagagtgcgacactgatcccggtcaaagtgctcgataattctggcagcgggtccctttacggtattacgcaaggcatattgtatgccgccgacatcgatgcggacgtcattaacatgtctctgggtggaggaggctacaatcagagcatggatgaggctgttcaaacagcagttgctcagggaaccattgtagtagcagcgactggcaatgatggtgcatcgtcgatcagttatcctgctgcctacagcagcgtcattgcggtgggatctgtgacgtccaatcgtacacgatcctcgttttctaactatggatctgggcttgaagttatggcaccgggcagcaacatctacagtacgtatcctaattccagatatacatctttgagtggtacaagcatggctactccgcacgttgcgggcgtagctgggctcattcgcgcagccaacccaggcatatctgtcgcgcaagcccgtcagattctgcgggataccgcgcaagaagcaggatcgttcacatactacggctatggaatcgtcgatgctcatgccgccgttgttgctgcatccggtggtagcggcggc

SEQ ID NO: 394 - protein, 413 aa, synthetic construct
  REGION 1..413: note = Variant of serine peptidase from Bacillus sinesaloumensis
MADQASQANGNQDVIEGELIVSVEPKNGKPDVSIQSAQSVTGQEDVLKSKGFTIVDTLHVEDSSVKPLVSKNFNKKVVEKMGLVYLVQYSPDQFKSSNIAKKELRKELMDLGFKVRYISENYKMMAIEGTATLQAVHPNQNWHYNMIKAPEAWAITSGSSSVKVAVLDTGIDHNHPSLANFVNTNLGRSFVGGNTMDVQGHGTHVAGTIASYGSVSGVMQSATLIPVKVLDNSGSGSLYGITQGILYAADIDADVINMSLGGGGYNQSMDEAVQTAVAQGTIVVAATGNDGASSISYPAAYSSVIAVGSVTSNRTRSSFSNYGSGLEVMAPGSNIYSTYPNSRYTSLSGTSMATPHVAGVAGLIRAANPGISVAQARQILRDTAQEAGSFTYYGYGIVDAHAAVVAASGGSGG

SEQ ID NO: 395 - DNA, 1239 bp, synthetic construct
  misc_feature 1..1239: note = Variant of serine peptidase from Bacillus sinesaloumensis
  source 1..1239: mol_type = other DNA
atggcagatcaagctagtcaagctaatggaaaccaggacgtcattgaaggcgagctgatcgtttcagtggaaccgaagaacggtaaacctgatgtgagcattcaaagtgcacaatccgtaacagggcaggaagacgtccttaaatcgaaaggctttacgatcgttgataccttgcatgtagaggatagcagcgtcaagccactcgtctcgaagaatttcaataagaaagtggtggagaagatgggactggtgtatcttgttcaatactctccggaccagtttaaaagttccaacgttgcgaagaaagaactcagaaaagaattgatggatctgggctttaaagtccgctatataagcgaaaattacaagatgatggcgatcgaaggtacagccactcttcaggcagtacaccctaaccaaaactggcattataatatgattaaagctccggaagcgtgggctattacgtctggatcctctagcgttaaagtagcagtcctggatacagggatcgaccataatcacccatccttggccaacttcgtgaatactaatcttggccggtcgtttgttggaggtaacaccatggatgttcaaggtcatggcacacatgttgctggcacgattgcatcttatgggagtgtaagcggagtgatgcaaagtgcgacactgatcccggtcaaagtgctcgataattctggcagcgggtccctttacggtattacgcaaggcatattgtatgccgccgacatcgatgcggacgtcattaacatgtctctgggtggaggaggctataatcagagcatggatgaggctgttcaaacagcagttaaccagggaaccattgtagtagcagcgactggcaatgatggtgcatcgtcgatcagttatcctgctgcctacagcagcgtcattgcggtgggatctgtgacgtccaatcgtactcgatcctcgttttctaactatggatctgggcttgaagttatggcaccgggcagcaacatctacagtacgtatcctaattccagatatacatctttgagtggtacaagcatggctactccgcacgttgcgggcgtagctgggctcattcgcgcagccaacccagacatatctgtcgcgcaagcccgtcagattctgcgggataccgcgcaagaagcaggatcgtttacacagtacggctatggaatcgtcgatgctcatgccgccgttgtggctgcatccggtggtagcggcggc

SEQ ID NO: 396 - protein, 413 aa, synthetic construct
  REGION 1..413: note = Variant of serine peptidase from Bacillus sinesaloumensis
MADQASQANGNQDVIEGELIVSVEPKNGKPDVSIQSAQSVTGQEDVLKSKGFTIVDTLHVEDSSVKPLVSKNFNKKVVEKMGLVYLVQYSPDQFKSSNVAKKELRKELMDLGFKVRYISENYKMMAIEGTATLQAVHPNQNWHYNMIKAPEAWAITSGSSSVKVAVLDTGIDHNHPSLANFVNTNLGRSFVGGNTMDVQGHGTHVAGTIASYGSVSGVMQSATLIPVKVLDNSGSGSLYGITQGILYAADIDADVINMSLGGGGYNQSMDEAVQTAVNQGTIVVAATGNDGASSISYPAAYSSVIAVGSVTSNRTRSSFSNYGSGLEVMAPGSNIYSTYPNSRYTSLSGTSMATPHVAGVAGLIRAANPDISVAQARQILRDTAQEAGSFTQYGYGIVDAHAAVVAASGGSGG

SEQ ID NO: 397 - DNA, 1239 bp, synthetic construct
  misc_feature 1..1239: note = Variant of serine peptidase from Bacillus sinesaloumensis
  source 1..1239: mol_type = other DNA
atggcagatcaagctagtcaagctaatggaaaccaggacgtcattgaaggcgagctgatcgtttcagtggaaccgaagaacggtaaacctgatgtgagcattcaaagtgcacaatccgtaacagggcaggaagacgtccttaaatcgaaaggctttacgatcgttgataccttgcatgtagaggatagcagcgtcaagccactcgtctcgaagaatttcaataagaaagtggtggagaagatgggactggtgtatcttgttcaatactctccggaccagtttaaaagttccaacattgcgaagaaagaactcagaaaagaattgatggatctgggctttaaagtccgctatataagcgaaaattacaagatgatggcgatcgaaggtacagccactcttcaggcagtacaccctaaccaaaactggcattataatatgattaaagctccggaagcgtgggctattacgtctggatcctctagcgttaaagtagcagtcctggatacagggatcgaccataatcacccatccttggccaacttcgtgaatactaatctgggccggtcgtttgttggcggaaacaccatggatgttcaaggtcatggcacacatgttgctggcacgattgcatcttatgggagtgtaagcggagtgatgcagagtgcgacactgatcccggtcaaagtgctcgataattctggcagcgggtccctttacggtattacgcaaggcatattgtatgccgccgacatcgatgcggacgtcattaacatgtctctgggtggaggaggcggtaatcagagcatggatgaggctgttcaaacagcagttgctcagggaaccattgtagtagcagcgactggcaatgatggtgcatcgtcgatcagttatcctgctgcctacagcagcgtcattgcggtgggatctgtggactccaatcgtacacgttcctcgttttctaactatggatctgggcttgaagttatggcaccgggcagcaacatctacagtacgtatcctaattccagatatacatctttgagtggtacaagcatggctactccgcacgttgcgggcgtagctgggctcattcgcgcagccaacccagacatatctgtcgcgcaagcccgtcagattctgcgggataccgcgcaagaagcaggatcgttcacacagtacggctatggaatcgtcgatgctcatgccgccgttgttgctgcatccggtggtagcggcggc

SEQ ID NO: 398 - protein, 413 aa, synthetic construct
  REGION 1..413: note = Variant of serine peptidase from Bacillus sinesaloumensis
MADQASQANGNQDVIEGELIVSVEPKNGKPDVSIQSAQSVTGQEDVLKSKGFTIVDTLHVEDSSVKPLVSKNFNKKVVEKMGLVYLVQYSPDQFKSSNIAKKELRKELMDLGFKVRYISENYKMMAIEGTATLQAVHPNQNWHYNMIKAPEAWAITSGSSSVKVAVLDTGIDHNHPSLANFVNTNLGRSFVGGNTMDVQGHGTHVAGTIASYGSVSGVMQSATLIPVKVLDNSGSGSLYGITQGILYAADIDADVINMSLGGGGGNQSMDEAVQTAVAQGTIVVAATGNDGASSISYPAAYSSVIAVGSVDSNRTRSSFSNYGSGLEVMAPGSNIYSTYPNSRYTSLSGTSMATPHVAGVAGLIRAANPDISVAQARQILRDTAQEAGSFTQYGYGIVDAHAAVVAASGGSGG

SEQ ID NO: 399 - DNA, 1239 bp, synthetic construct
  misc_feature 1..1239: note = Variant of serine peptidase from Bacillus sinesaloumensis
  source 1..1239: mol_type = other DNA
atggcagatcaagctagtcaagctaatggaaaccaggacgtcattgaaggcgagctgatcgtttcagtggaaccgaagaacggtaaacctgatgtgagcattcaaagtgcacaatccgtaacagggcaggaagacgtccttaaatcgaaaggctttacgatcgttgataccttgcatgtagaggatagcagcgtcaagccactcgtctcgaagaatttcaataagaaagtggtggagaagatgggactgatgtatcttgttcaatactctccggaccagtttaaaagttccaacattgcgaagaaagaactcagaaaagaattgatggatctgggctttaaagtccgctatataagcgaaaattacaagatgatggcgatcgaaggtacagccactcttcaggcagtacaccctaaccaaaactggcattataatatgattaaagctccggaagcgtgggctattacgtctggaggctctagcgttaaagtagcagtcctggatacagggatcgaccataatcacccatccttggccaacttcgtgaatactaatcttggccggtcgtttgttggcggaaacaccatggatgttcaaggtcatggcacacatgttgctggcacgattgcatcttatgggagtgtaagcggagtgatgcagagtgcgacactgatcccggtcaaagtgctcgataattctggcagcgggtccctttacggtattacgcaaggcatattgtatgccgccgacatcgatgcggacgtcattaacatgtctctgggtggaggaggcggtaatcagagcatggatgaggctgttcaaacagcagttgctaaaggaaccattgtagtagcagcgactggcaatgatggtgcatcgtcgatcagttatcctgctgcctacagcagcgtcattgcggtgggatctgtggactccaatcgtacacgttcctcgttttctaactatggatctgggcttgaagttatggcaccgggcagcaacatctacagtacgtatcctaatagcagatatacatctttgagtggtacaagcatggctactccgcacgttgcgggcgtagctgggctcattcgcgcagccaacccaggcatatctgtcgcgcaagcccgtcagattctgcgggataccgcgcaagaagcaggatcgttcacacaatacggctatggaatcgtcgatgctcatgccgccgttgttgctgcatccggtggtagcggcggc

SEQ ID NO: 400 - protein, 413 aa, synthetic construct
  REGION 1..413: note = Variant of serine peptidase from Bacillus sinesaloumensis
MADQASQANGNQDVIEGELIVSVEPKNGKPDVSIQSAQSVTGQEDVLKSKGFTIVDTLHVEDSSVKPLVSKNFNKKVVEKMGLMYLVQYSPDQFKSSNIAKKELRKELMDLGFKVRYISENYKMMAIEGTATLQAVHPNQNWHYNMIKAPEAWAITSGGSSVKVAVLDTGIDHNHPSLANFVNTNLGRSFVGGNTMDVQGHGTHVAGTIASYGSVSGVMQSATLIPVKVLDNSGSGSLYGITQGILYAADIDADVINMSLGGGGGNQSMDEAVQTAVAKGTIVVAATGNDGASSISYPAAYSSVIAVGSVDSNRTRSSFSNYGSGLEVMAPGSNIYSTYPNSRYTSLSGTSMATPHVAGVAGLIRAANPGISVAQARQILRDTAQEAGSFTQYGYGIVDAHAAVVAASGGSGG

SEQ ID NO: 401 - DNA, 1239 bp, synthetic construct
  misc_feature 1..1239: note = Variant of serine peptidase from Bacillus sinesaloumensis
  source 1..1239: mol_type = other DNA
atggcagatcaagctagtcaagctaatggaaaccaggacgtcattgaaggcgagctgatcgtttcagtggaaccgaagaacggtaaacctgatgtgagcattcaaagtgcacaatccgtaacagggcaggaagacgtccttaaatcgaaaggctttacgatcgttgataccttgcatgtagaggatagcagcgtcaagccactcgtctcgaagaatttcaataagaaagtggtggagaagatgggactggtgtatcttgttcaatactctccggaccagtttaaaagttccaacattgcgaagaaagaactcagaaaagaattgatggatctgggctttaaagtccgctatataagcgaaaattacaagatgatggcgatcgaaggtacagccactcttcaggcagtacaccctaaccaaaactggcattataatatgattaaagctccggaagcgtgggctattacgtctggatcctctagcgttaaagtagcagtcctggatacagggatcgaccataatcacccatccttggccaacttcgtgaatactaatcttggccggtcgtttgttggaggaaacaccatggatgttcaaggtcatggcacacatgttgctggcacgattgcatcttatgggagtgtaagcggagtgatgcagagtgcgacactgatcccggtcaaagtgctcgataattctggcagcgggtccctttacggtattacgcaaggcatattgtatgccgccgacatcgatgcggacgtcattaacatgtctctgggtggaggaggctataatcagagcatggatgaggctgttcaaacagcagttgctcaaggaaccattgtagtagcagcgactggcaatgatggtgcatcgtcgatcagttatcctgctgcctacagcagcgtcattgcggtgggatctgtggactccaatcgtacaaagtcctcgttttctaactatggatctgggcttgaagttatggcaccgggcagcaacatctacagtacgtatcctaattccagatatacatctttgagtggtacaagcatggctactccgcacgttgcgggcgtagctgggctcattcgcgcagccaacccagacatatctgtcgcgcaagcccgtcagattctgcgggataccgcgcaagaagcaggatcgttcacacagtacggctatggaatcgtcgatgctcatgccgccgttgttgctgcatccggtggtagcggcggc

SEQ ID NO: 402 - protein, 413 aa, synthetic construct
  REGION 1..413: note = Variant of serine peptidase from Bacillus sinesaloumensis
MADQASQANGNQDVIEGELIVSVEPKNGKPDVSIQSAQSVTGQEDVLKSKGFTIVDTLHVEDSSVKPLVSKNFNKKVVEKMGLVYLVQYSPDQFKSSNIAKKELRKELMDLGFKVRYISENYKMMAIEGTATLQAVHPNQNWHYNMIKAPEAWAITSGSSSVKVAVLDTGIDHNHPSLANFVNTNLGRSFVGGNTMDVQGHGTHVAGTIASYGSVSGVMQSATLIPVKVLDNSGSGSLYGITQGILYAADIDADVINMSLGGGGYNQSMDEAVQTAVAQGTIVVAATGNDGASSISYPAAYSSVIAVGSVDSNRTKSSFSNYGSGLEVMAPGSNIYSTYPNSRYTSLSGTSMATPHVAGVAGLIRAANPDISVAQARQILRDTAQEAGSFTQYGYGIVDAHAAVVAASGGSGG

SEQ ID NO: 403 - DNA, 1239 bp, synthetic construct
  misc_feature 1..1239: note = Variant of serine peptidase from Bacillus sinesaloumensis
  source 1..1239: mol_type = other DNA
atggcagatcaagctagtcaagctaatggaaaccaggacgtcattgaaggcgagctgatcgtttcagtggaaccgaagaacggtaaacctgatgtgagcattcaaagtgcacaatccgtaacagggcaggaagacgtccttaaatcgaaaggctttacgatcgttgataccttgcatgtagaggatagcagcgtcaagccactcgtctcgaagaatttcaataagaaagtggtggagaagatgggactggtgtatcttgttcaatactctccggaccagtttaaaagttccaacattgcgaagaaagaactcagaaaagaattgatggatctgggctttaaagtccgctatataagcgaaaattacaagatgatggcgatcgaaggtacagccactcttcaggcagtacaccctaaccaaaactggcattataatatgattaaagctccggaagcgtgggctattacgtctggatcctctagcgttaaagtagcagtcctggatacagggatcgaccataatcacccatccttggccaacttcgtgaatactaatctgggccggtcgtttgttggcggaaacaccatggatgttcaaggtcatggcacacatgttgctggcacgattgcatcttatgggagtgtaagcggagtgatgcagagtgcgacactgatcccggtcaaagtgctcgataattctggcagcgggtccctttacggtattacgcaaggcatattgtatgccgccgacatcgatgcggacgtcattaacatgtctctgggtggaggaggctacaatcagagcatggatgaggctgttcaaacagcagttgctcagggaaccattgtagtagcagcgactggcaatgatggtgcatcgtcgatcagttatcctgctgcctacagcagcgtcattgcggtgggatctgtgacgtccaatcgtacacgttcctcgttttctaactatggatctgggcttgaagttatggcaccgggcagcaacatctacagtacgtatcctaataacagatatacatctttgagtggtacaagcatggctactccgcacgttgcgggcgtagctgggctcattcgcgcagccaacccaggcatatctgtcgcgcaagcccgtcagattctgcgggataccgcgcaagaagcaggatcgttcacacaatacggctatggaatcgtcgatgctcatgccgccgttgttgctgcatccggtggtagcggcggc

SEQ ID NO: 404 - protein, 413 aa, synthetic construct
  REGION 1..413: note = Variant of serine peptidase from Bacillus sinesaloumensis
MADQASQANGNQDVIEGELIVSVEPKNGKPDVSIQSAQSVTGQEDVLKSKGFTIVDTLHVEDSSVKPLVSKNFNKKVVEKMGLVYLVQYSPDQFKSSNIAKKELRKELMDLGFKVRYISENYKMMAIEGTATLQAVHPNQNWHYNMIKAPEAWAITSGSSSVKVAVLDTGIDHNHPSLANFVNTNLGRSFVGGNTMDVQGHGTHVAGTIASYGSVSGVMQSATLIPVKVLDNSGSGSLYGITQGILYAADIDADVINMSLGGGGYNQSMDEAVQTAVAQGTIVVAATGNDGASSISYPAAYSSVIAVGSVTSNRTRSSFSNYGSGLEVMAPGSNIYSTYPNNRYTSLSGTSMATPHVAGVAGLIRAANPGISVAQARQILRDTAQEAGSFTQYGYGIVDAHAAVVAASGGSGG

SEQ ID NO: 405 - DNA, 1239 bp, synthetic construct
  misc_feature 1..1239: note = Variant of serine peptidase from Bacillus sinesaloumensis
  source 1..1239: mol_type = other DNA
atggcagatcaagctagtcaagctaatggaaaccaggacgtcattgaaggcgagctgatcgtttcagtggaaccgaagaacggtaaacctgatgtgagcattcaaagtgcacaatccgtaacagggcaggaagacgtccttaaatcgaaaggctttacgatcgttgataccttgcatgtagaggatagcagcgtcaagccactcgtctcgaagaatttcaataagaaagtggtggagaagatgggactggtgtatcttgttcaatactctccggaccagtttaaaagttccaacattgcgaagaaagaactcagaaaagaattgatggatctgggctttaaagtccgctatataagcgaaaattacaagatgatggcgatcgaaggtacagccactcttcaggcagtacaccctaaccaaaactggcattataatatgattaaagctccggaagcgtgggctattacgtctggatcctctagcgttaaagtagcagtcctggatacagggatcgaccataatcacccatccttggccaacttcgtgaatactaatcttggccggtcgtttgttggaggaaacaccatggatgttcaaggtcatggcacacatgttgctggcacgattgcatcttatgggagtgtaagcggagtgatgcagagtgcgacactgatcccggtcaaagtgctcgataattctggcagcgggtccctttacggtattacgcaaggcatattgtatgccgccgacatcgatgcggacgtcattaacatgtctctgggtggaggaggcggtaatcagagcatggatgaggctgttcaaacagcagttgctcagggaaccattgtagtagcagcgactggcaatgatggtgcatcgtcgatcagttatcctgctgcctacagcagcgtcattgcggtgggatctgtggactccaatcgtacacgttcctcgttttctaactatggatctgggcttgaagttatggcaccgggcagcaacatctacagtacgtatcctaatagcagatatacatctttgagtggtacaagcatggctactccgcacgttgcgggcgtagctgggctcattcgcgcagccaacccaggcatatctgtcgcgcaagcccgtcagattctgcgggataccgcgcaagaagcaggatcgttcacacagtacggctatggaatcgtcgatgctcatgccgccgttgttgctgcatccggtggtagcggcggc

SEQ ID NO: 406 - protein, 413 aa, synthetic construct
  REGION 1..413: note = Variant of serine peptidase from Bacillus sinesaloumensis
MADQASQANGNQDVIEGELIVSVEPKNGKPDVSIQSAQSVTGQEDVLKSKGFTIVDTLHVEDSSVKPLVSKNFNKKVVEKMGLVYLVQYSPDQFKSSNIAKKELRKELMDLGFKVRYISENYKMMAIEGTATLQAVHPNQNWHYNMIKAPEAWAITSGSSSVKVAVLDTGIDHNHPSLANFVNTNLGRSFVGGNTMDVQGHGTHVAGTIASYGSVSGVMQSATLIPVKVLDNSGSGSLYGITQGILYAADIDADVINMSLGGGGGNQSMDEAVQTAVAQGTIVVAATGNDGASSISYPAAYSSVIAVGSVDSNRTRSSFSNYGSGLEVMAPGSNIYSTYPNSRYTSLSGTSMATPHVAGVAGLIRAANPGISVAQARQILRDTAQEAGSFTQYGYGIVDAHAAVVAASGGSGG

SEQ ID NO: 407 - DNA, 1239 bp, synthetic construct
  misc_feature 1..1239: note = Variant of serine peptidase from Bacillus sinesaloumensis
  source 1..1239: mol_type = other DNA
atggcagatcaagctagtcaagctaatggaaaccaggacgtcattgaaggcgagctgatcgtttcagtggaaccgaagaacggtaaacctgatgtgagcattcaaagtgcacaatccgtaacagggcaggaagacgtccttaaatcgaaaggctttacgatcgttgataccttgcatgtagaggatagcagcgtcaagccactcgtctcgaagaatttcaataagaaagtggtggagaagatgggactggtgtatcttgttcaatactctccggaccagtttaaaagttccaacattgcgaagaaagaactcagaaaagaattgatggatctgggctttaaagtccgctatataagcgaaaattacaagatgatggcgatcgaaggtacagccactcttcaggcagtacaccctaaccaaaactggcattataatatgattaaagctccggaagcgtgggctattacgtctggatcctctagcgttaaagtagcagtcctggatacagggatcgaccataatcacccatccttggccaacttcgtgaatactaatcttggccggtcgtttgttgacggaaacaccatggatgttcaaggtcatggcacacatgttgctggcacgattgcatcttatgggagtgtaagcggagtgatgcagagtgcgacactgatcccggtcaaagtgctcgataattctggcagcgggtccctttacggtattacgcaaggcatattgtatgccgccgacatcgatgcggacgtcattaacatgtctctgggtggaggaggctataatcagagcatggatgaggctgttcaaacagcagttgctcagggaaccattgtagtagcagcgactggcaatgatggtgcatcgtcgatcagttatcctgctgcctacagcagcgtcattgcggtgggatctgtggactccaatcgtacaaagtcctcgttttctaactatggatctgggcttgaagttatggcaccgggcagcaacatctacagtacgtatcctaattccagatatacatctttgagtggtacaagcatggctactccgcacgttgcgggcgtagctgggctcattcgcgcagccaacccagacatatctgtcgcgcaagcccgtcagattctgcgggataccgcgcaagaagcaggatcgttcacacaatacggctatggaatcgtcgatgctcatgccgccgttgttgctgcatccggtggtagcggcggc

SEQ ID NO: 408 - protein, 413 aa, synthetic construct
  REGION 1..413: note = Variant of serine peptidase from Bacillus sinesaloumensis
MADQASQANGNQDVIEGELIVSVEPKNGKPDVSIQSAQSVTGQEDVLKSKGFTIVDTLHVEDSSVKPLVSKNFNKKVVEKMGLVYLVQYSPDQFKSSNIAKKELRKELMDLGFKVRYISENYKMMAIEGTATLQAVHPNQNWHYNMIKAPEAWAITSGSSSVKVAVLDTGIDHNHPSLANFVNTNLGRSFVDGNTMDVQGHGTHVAGTIASYGSVSGVMQSATLIPVKVLDNSGSGSLYGITQGILYAADIDADVINMSLGGGGYNQSMDEAVQTAVAQGTIVVAATGNDGASSISYPAAYSSVIAVGSVDSNRTKSSFSNYGSGLEVMAPGSNIYSTYPNSRYTSLSGTSMATPHVAGVAGLIRAANPDISVAQARQILRDTAQEAGSFTQYGYGIVDAHAAVVAASGGSGG

SEQ ID NO: 409 - DNA, 1239 bp, synthetic construct
  misc_feature 1..1239: note = Variant of serine peptidase from Bacillus sinesaloumensis
  source 1..1239: mol_type = other DNA
atggcagatcaagctagtcaagctaatggaaaccaggacgtcattgaaggcgagctgatcgtttcagtggaaccgaagaacggtaaacctgatgtgagcattcaaagtgcacaatccgtaacagggcaggaagacgtccttaaatcgaaaggctttacgatcgttgataccttgcatgtagaggatagcagcgtcaagccactcgtctcgaagaatttcaataagaaagtggtggagaagatgggactggtgtatcttgttcaatactctccggaccagtttaaaagttccaacattgcgaagaaagaactcagaaaagaattgatggatctgggctttaaagtccgctatataagcgaaaattacaagatgatggcgatcgaaggtacagccactcttcaggcagtacaccctaaccaacaatggcattataatatgattaaagctccggaagcgtgggatattacgtctggaagctctagcgttaaagtagcagtcctggatacagggatcgaccataatcacccatccttggccaacttcgtgaatactaatcttggccggtcgtttgttgacggaaacaccatggatgtccaaggtcatggcacacatgttgctggcacgattgcatcttatgggagtgtaagcggagtgatgcagagtgcgacactgatcccggtcaaagtgctcgataattctggcagcgggtccctttacggtattacgcaaggcatattgtatgccgccgacatcgatgcggacgtcattaacatgtctctgggtggaggaggctacaatcagagcatggatgaggctgttcaaacagcagttgctcaaggaaccattgtagtagcagcgactggcaatgatggtgcatcgtcgatcagttatcctgctgcctacagcagcgtcattgcggtgggatctgtgacgtccaatcgtacacgatcctcgttttctaactatggatctgggcttgaagttatggcaccgggcagcaacatctacagtacgtatcctaattccagatatacatctttgagtggtacaagcatggctactccgcacgttgcgggcgtagctgggctcattcgcgcagccaacccagacatatctgtcgcgcaagcccgtcagattctgcgggataccgcgcaagaagcaggatcgttcacacaatacggctatggaatcgtcgatgctcatgccgccgttgttgctgcatccggtggtagcggcggc

SEQ ID NO: 410 - protein, 413 aa, synthetic construct
  REGION 1..413: note = Variant of serine peptidase from Bacillus sinesaloumensis
MADQASQANGNQDVIEGELIVSVEPKNGKPDVSIQSAQSVTGQEDVLKSKGFTIVDTLHVEDSSVKPLVSKNFNKKVVEKMGLVYLVQYSPDQFKSSNIAKKELRKELMDLGFKVRYISENYKMMAIEGTATLQAVHPNQQWHYNMIKAPEAWDITSGSSSVKVAVLDTGIDHNHPSLANFVNTNLGRSFVDGNTMDVQGHGTHVAGTIASYGSVSGVMQSATLIPVKVLDNSGSGSLYGITQGILYAADIDADVINMSLGGGGYNQSMDEAVQTAVAQGTIVVAATGNDGASSISYPAAYSSVIAVGSVTSNRTRSSFSNYGSGLEVMAPGSNIYSTYPNSRYTSLSGTSMATPHVAGVAGLIRAANPDISVAQARQILRDTAQEAGSFTQYGYGIVDAHAAVVAASGGSGG

SEQ ID NO: 411 - DNA, 1239 bp, synthetic construct
  misc_feature 1..1239: note = Variant of serine peptidase from Bacillus sinesaloumensis
  source 1..1239: mol_type = other DNA
atggcagatcaagctagtcaagctaatggaaaccaggacgtcattgaaggcgagctgatcgtttcagtggaaccgaagaacggtaaacctgatgtgagcattcaaagtgcacaatccgtaacagggcaggaagacgtccttaaatcgaaaggctttacgatcgttgataccttgcatgtagaggatagcagcgtcaagccactcgtctcgaagaatttcaataagaaagtggtggagaagatgggactggtgtatcttgttcaatactctccggaccagtttaaaagttccaacattgcgaagaaagaactcagaaaagaattgatggatctgggctttaaagtccgctatataagcgaaaattacaagatgatggcgatcgaaggtacagccactcttcaggcagtacaccctaaccaaaactggcattataatatgattaaagctccggaagcgtgggctattacgtctggatcctctagcgttaaagtagcagtcctggatacagggatcgaccataatcacccatccttggccaacttcgtgaatactaatctgggccggtcgtttgttggaggaaacaccatggatgtccaaggtcatggcacacatgttgctggcacgattgcatcttatgggagtgtaagcggagtgatgcagagtgcgacactgatcccggtcaaagtgctcgataattctggcagcgggtccctttacggtattacgcaaggcatattgtatgccgccgacatcgatgcggacgtcattaacatgtctctgggtggaggaggcggtaatcagagcatggatgaggctgttcaaacagcagttgctcagggaaccattgtagtagcagcgactggcaatgatggtgcatcgtcgatcagttatcctgctgcctacagcagcgtcattgcggtgggatctgtggactccaatcgtacaaagtcctcgttttctaactatggatctgggcttgaagttatggcaccgggcagcaacatctacagtacgtatcctaataacagatatacatctttgagtggtacaagcatggctactccgcacgttgcgggcgtagctgggctcattcgcgcagccaacccagacatatctgtcgcgcaagcccgtcagattctgcgggataccgcacaagaagcaggatcgttcacacaatacggctatggaatcgtcgatgctcatgccgccgttgttgctgcatccggtggtagcggcggc

SEQ ID NO: 412 - protein, 413 aa, synthetic construct
  REGION 1..413: note = Variant of serine peptidase from Bacillus sinesaloumensis
MADQASQANGNQDVIEGELIVSVEPKNGKPDVSIQSAQSVTGQEDVLKSKGFTIVDTLHVEDSSVKPLVSKNFNKKVVEKMGLVYLVQYSPDQFKSSNIAKKELRKELMDLGFKVRYISENYKMMAIEGTATLQAVHPNQNWHYNMIKAPEAWAITSGSSSVKVAVLDTGIDHNHPSLANFVNTNLGRSFVGGNTMDVQGHGTHVAGTIASYGSVSGVMQSATLIPVKVLDNSGSGSLYGITQGILYAADIDADVINMSLGGGGGNQSMDEAVQTAVAQGTIVVAATGNDGASSISYPAAYSSVIAVGSVDSNRTKSSFSNYGSGLEVMAPGSNIYSTYPNNRYTSLSGTSMATPHVAGVAGLIRAANPDISVAQARQILRDTAQEAGSFTQYGYGIVDAHAAVVAASGGSGG

SEQ ID NO: 413 - DNA, 1239 bp, synthetic construct
  misc_feature 1..1239: note = Variant of serine peptidase from Bacillus sinesaloumensis
  source 1..1239: mol_type = other DNA
atggcagatcaagctagtcaagctaatggaaaccaggacgtcattgaaggcgagctgatcgtttcagtggaaccgaagaacggtaaacctgatgtgagcattcaaagtgcacaatccgtaacagggcaggaagacgtccttaaatcgaaaggctttacgatcgttgataccttgcatgtagaggatagcagcgtcaagccactcgtctcgaagaatttcaataagaaagtggtggagaagatgggactggtgtatcttgttcaatactctccggaccagtttaaaagttccaacattgcgaagaaagaactcagaaaagaattgatggatctgggctttaaagtccgctatataagcgaaaattacaagatgatggcgatcgaaggtacagccactcttcaggcagtacaccctaaccaaaactggcattataatatgattaaagctccggaagcgtgggctattacgtctggatcctctagcgttaaagtagcagtcctggatacagggatcgaccataatcacccatccttggccaacttcgtgaatactaatcttggccggtcgtttgttggaggaaacaccatggatgtccaaggtcatggcacacatgttgctggcacgattgcatcttatgggagtgtaagcggagtgatgcagagtgcgacactgatcccggtcaaagtgctcgataattctggcagcgggtccctttacggtattacgcaaggcatattgtatgccgccgacatcgatgcggacgtcattaacatgtctctgggtggaggaggctacaatcagagcatggatgaggctgttcaaacagcagttgctaaaggaaccattgtagtagcagcgactggcaatgatggtgcatcgtcgatcagttatcctgctgcctacagcagcgtcattgcggtgggatctgtggactccaatcgtacaaagtcctcgttttctaactatggatctgggcttgaagttatggcaccgggcagcaacatctacagtacgtatcctaattccagatatacatctttgagtggtacaagcatggctactccgcacgttgcgggcgtagctgggctcattcgcgcagccaacccagacatatctgtcgcgcaagcccgtcagattctgcgggataccgcgcaagaagcaggatcgttcacacaatacggctatggaatcgtcgatgctcatgccgccgttgttgctgcatccggtggtagcggcggc

SEQ ID NO: 414 - protein, 413 aa, synthetic construct
  REGION 1..413: note = Variant of serine peptidase from Bacillus sinesaloumensis
MADQASQANGNQDVIEGELIVSVEPKNGKPDVSIQSAQSVTGQEDVLKSKGFTIVDTLHVEDSSVKPLVSKNFNKKVVEKMGLVYLVQYSPDQFKSSNIAKKELRKELMDLGFKVRYISENYKMMAIEGTATLQAVHPNQNWHYNMIKAPEAWAITSGSSSVKVAVLDTGIDHNHPSLANFVNTNLGRSFVGGNTMDVQGHGTHVAGTIASYGSVSGVMQSATLIPVKVLDNSGSGSLYGITQGILYAADIDADVINMSLGGGGYNQSMDEAVQTAVAKGTIVVAATGNDGASSISYPAAYSSVIAVGSVDSNRTKSSFSNYGSGLEVMAPGSNIYSTYPNSRYTSLSGTSMATPHVAGVAGLIRAANPDISVAQARQILRDTAQEAGSFTQYGYGIVDAHAAVVAASGGSGG

SEQ ID NO: 415 - DNA, 1239 bp, synthetic construct
  misc_feature 1..1239: note = Variant of serine peptidase from Bacillus sinesaloumensis
  source 1..1239: mol_type = other DNA
atggcagatcaagctagtcaagctaatggaaaccaggacgtcattgaaggcgagctgatcgtttcagtggaaccgaagaacggtaaacctgatgtgagcattcaaagtgcacaatccgtaacagggcaggaagacgtccttaaatcgaaaggctttacgatcgttgataccttgcatgtagaggatagcagcgtcaagccactcgtctcgaagaatttcaataagaaagtggtggagaagatgggactggtgtatcttgttcaatactctccggaccagtttaaaagttccaacattgcgaagaaagaactcagaaaagaattgatggatctgggctttaaagtccgctatataagcgaaaattacaagatgatggcgatcgaaggtacagccactcttcaggcagtacaccctaaccaacaatggcattataatatgattaaagctccggaagcgtgggctattacgtctggatcctctagcgttaaagtagcagtcctggatacagggatcgaccataatcacccatccttggccaacttcgtgaatactaatcttggccggtcgtttgttggcggaaacaccatggatgttcaaggtcatggcacacatgttgctggcacgattgcatcttatgggagtgtaagcggagtgatgcagagtgcgacactgatcccggtcaaagtgctcgataattctggcagcgggtccctttacggtattacgcaaggcatattgtatgccgccgacatcgatgcggacgtcattaacatgtctctgggtggaggaggcggtaatcagagcatggatgaggctgttcaaacagcagttgctaaaggaaccattgtagtagcagcgactggcaatgatggtgcatcgtcgatcagttatcctgctgcctacagcagcgtcattgcggtgggatctgtggactccaatcgtacacgttcctcgttttctaactatggatctgggcttgaagttatggcaccgggcagcaacatctacagtacgtatcctaataacagatatacatctttgagtggtacaagcatggctactccgcacgttgcgggcgtagctgggctcattcgcgcagccaacccagacatatctgtcgcgcaagcccgtcagattctgcgggataccgcgcaagaagcaggatcgttcacacaatacggctatggaatcgtcgatgctcatgccgccgttgttgctgcatccggtggtagcggcggc

SEQ ID NO: 416 - protein, 413 aa, synthetic construct
  REGION 1..413: note = Variant of serine peptidase from Bacillus sinesaloumensis
MADQASQANGNQDVIEGELIVSVEPKNGKPDVSIQSAQSVTGQEDVLKSKGFTIVDTLHVEDSSVKPLVSKNFNKKVVEKMGLVYLVQYSPDQFKSSNIAKKELRKELMDLGFKVRYISENYKMMAIEGTATLQAVHPNQQWHYNMIKAPEAWAITSGSSSVKVAVLDTGIDHNHPSLANFVNTNLGRSFVGGNTMDVQGHGTHVAGTIASYGSVSGVMQSATLIPVKVLDNSGSGSLYGITQGILYAADIDADVINMSLGGGGGNQSMDEAVQTAVAKGTIVVAATGNDGASSISYPAAYSSVIAVGSVDSNRTRSSFSNYGSGLEVMAPGSNIYSTYPNNRYTSLSGTSMATPHVAGVAGLIRAANPDISVAQARQILRDTAQEAGSFTQYGYGIVDAHAAVVAASGGSGG

SEQ ID NO: 417 - DNA, 1239 bp, synthetic construct
  misc_feature 1..1239: note = Variant of serine peptidase from Bacillus sinesaloumensis
  source 1..1239: mol_type = other DNA
atggcagatcaagctagtcaagctaatggaaaccaggacgtcattgaaggcgagctgatcgtttcagtggaaccgaagaacggtaaacctgatgtgagcattcaaagtgcacaatccgtaacagggcaggaagacgtccttaaatcgaaaggctttacgatcgttgataccttgcatgtagaggatagcagcgtcaagccactcgtctcgaagaatttcaataagaaagtggtggagaagatgggactggtgtatcttgttcaatactctccggaccagtttaaaagttccaacattgcgaagaaagaactcagaaaagaattgatggatctgggctttaaagtccgctatataagcgaaaattacaagatgatggcgatcgaaggtacagccactcttcaggcagtacaccctaaccaacaatggcattataatatgattaaagctccggaagcgtgggctattacgtctggatcctctagcgttaaagtagcagtcctggatacagggatcgaccataatcacccatccttggccaacttcgtgaatactaatcttggccggtcgtttgttgacggaaacaccatggatgttcaaggtcatggcacacatgttgctggcacgattgcatcttatgggagtgtaagcggagtgatgcagagtgcgacactgatcccggtcaaagtgctcgataattctggcagcgggtccctttacggtattacgcaaggcatattgtatgccgccgacatcgatgcggacgtcattaacatgtctctgggtggaggaggctacaatcagagcatggatgaggctgttcaaacagcagttgctcagggaaccattgtagtagcagcgactggcaatgatggtgcatcgtcgatcagttatcctgctgcctacagcagcgtcattgcggtgggatctgtggactccaatcgtacaaagtcctcgttttctaactatggatctgggcttgaagttatggcaccgggcagcaacatctacagtacgtatcctaattccagatatacatctttgagtggtacaagcatggctactccgcacgttgcgggcgtagctgggctcattcgcgcagccaacccaggcatatctgtcgcgcaagcccgtcagattctgcgggataccgcgcaagaagcaggatcgttcacacaatacggctatggaatcgtcgatgctcatgccgccgttgttgctgcatccggtggtagcggcggc

SEQ ID NO: 418 - protein, 413 aa, synthetic construct
  REGION 1..413: note = Variant of serine peptidase from Bacillus sinesaloumensis
MADQASQANGNQDVIEGELIVSVEPKNGKPDVSIQSAQSVTGQEDVLKSKGFTIVDTLHVEDSSVKPLVSKNFNKKVVEKMGLVYLVQYSPDQFKSSNIAKKELRKELMDLGFKVRYISENYKMMAIEGTATLQAVHPNQQWHYNMIKAPEAWAITSGSSSVKVAVLDTGIDHNHPSLANFVNTNLGRSFVDGNTMDVQGHGTHVAGTIASYGSVSGVMQSATLIPVKVLDNSGSGSLYGITQGILYAADIDADVINMSLGGGGYNQSMDEAVQTAVAQGTIVVAATGNDGASSISYPAAYSSVIAVGSVDSNRTKSSFSNYGSGLEVMAPGSNIYSTYPNSRYTSLSGTSMATPHVAGVAGLIRAANPGISVAQARQILRDTAQEAGSFTQYGYGIVDAHAAVVAASGGSGG

SEQ ID NO: 419 - DNA, 1239 bp, synthetic construct
  misc_feature 1..1239: note = Variant of serine peptidase from Bacillus sinesaloumensis
  source 1..1239: mol_type = other DNA
atggcagatcaagctagtcaagctaatggaaaccaggacgtcattgaaggcgagctgatcgtttcagtggaaccgaagaacggtaaacctgatgtgagcattcaaagtgcacaatccgtaacagggcaggaagacgtccttaaatcgaaaggctttacgatcgttgataccttgcatgtagaggatagcagcgtcaagccactcgtctcgaagaatttcaataagaaagtggtggagaagatgggactggtgtatcttgttcaatactctccggaccagtttaaaagttccaacattgcgaagaaagaactcagaaaagaattgatggatctgggctttaaagtccgctatataagcgaaaattacaagatgatggcgatcgaaggtacagccactcttcaggcagtacaccctaaccaacaatggcattataatatgattaaagctccggaagcgtgggctattacgtctggatcctctagcgttaaagtagcagtcctggatacagggatcgaccataatcacccatccttggccaacttcgtgaatactaatcttggccggtcgtttgttggaggaaacaccatggatgttcaaggtcatggcacacatgttgctggcacgattgcatcttatgggagtgtaagcggagtgatgcagagtgcgacactgatcccggtcaaagtgctcgataattctggcagcgggtccctttacggtattacgcaaggcatattgtatgccgccgacatcgatgcggacgtcattaacatgtctctgggtggaggaggctataatcagagcatggatgaggctgttcaaacagcagttgctcagggaaccattgtagtagcagcgactggcaatgatggtgcatcgtcgatcagttatcctgctgcctacagcagcgtcattgcggtgggatctgtgacgtccaatcgtacacgatcctcgttttctaactatggatctgggcttgaagttatggcaccgggcagcaacatctacagtacgtatcctaattccagatatacatctttgagtggtacaagcatggctactccgcacgttgcgggcgtagctgggctcattcgcgcagccaacccagacatatctgtcgcgcaagcccgtcagattctgcgggataccgcgcaagaagcaggatcgttcacacagtacggctatggaatcgtcgatgctcatgccgccgttgttgctgcatccggtggtagcggcggc

SEQ ID NO: 420 - protein, 413 aa, synthetic construct
  REGION 1..413: note = Variant of serine peptidase from Bacillus sinesaloumensis
MADQASQANGNQDVIEGELIVSVEPKNGKPDVSIQSAQSVTGQEDVLKSKGFTIVDTLHVEDSSVKPLVSKNFNKKVVEKMGLVYLVQYSPDQFKSSNIAKKELRKELMDLGFKVRYISENYKMMAIEGTATLQAVHPNQQWHYNMIKAPEAWAITSGSSSVKVAVLDTGIDHNHPSLANFVNTNLGRSFVGGNTMDVQGHGTHVAGTIASYGSVSGVMQSATLIPVKVLDNSGSGSLYGITQGILYAADIDADVINMSLGGGGYNQSMDEAVQTAVAQGTIVVAATGNDGASSISYPAAYSSVIAVGSVTSNRTRSSFSNYGSGLEVMAPGSNIYSTYPNSRYTSLSGTSMATPHVAGVAGLIRAANPDISVAQARQILRDTAQEAGSFTQYGYGIVDAHAAVVAASGGSGG

SEQ ID NO: 421 - DNA, 1239 bp, synthetic construct
  misc_feature 1..1239: note = Variant of serine peptidase from Bacillus sinesaloumensis
  source 1..1239: mol_type = other DNA
atggcagatcaagctagtcaagctaatggaaaccaggacgtcattgaaggcgagctgatcgtttcagtggaaccgaagaacggtaaacctgatgtgagcattcaaagtgcacaatccgtaacagggcaggaagacgtccttaaatcgaaaggctttacgatcgttgataccttgcatgtagaggatagcagcgtcaagccactcgtctcgaagaatttcaataagaaagtggtggagaagatgggactggtgtatcttgttcaatactctccggaccagtttaaaagttccaacattgcgaagaaagaactcagaaaagaattgatggatctgggctttaaagtccgctatataagcgaaaattacaagatgatggcgatcgaaggtacagccactcttcaggcagtacaccctaaccaacaatggcattataatatgattaaagctccggaagcgtgggctattacgtctggatcctctagcgttaaagtagcagtcctggatacagggatcgaccataatcacccatccttggccaacttcgtgaatactaatcttggccggtcgtttgttggaggaaacaccatggatgttcaaggtcatggcacacatgttgctggcacgattgcatcttatgggagtgtaagcggagtgatgcagagtgcgacactgatcccggtcaaagtgctcgataattctggcagcgggtccctttacggtattacgcaaggcatattgtatgccgccgacatcgatgcggacgtcattaacatgtctctgggtggaggaggcggtaatcagagcatggatgaggctgttcaaacagcagttgctcagggaaccattgtagtagcagcgactggcaatgatggtgcatcgtcgatcagttatcctgctgcctacagcagcgtcattgcggtgggatctgtggactccaatcgtacacgttcctcgttttctaactatggatctgggcttgaagttatggcaccgggcagcaacatctacagtacgtatcctaattccagatatacatctttgagtggtacaagcatggctactccgcacgttgcgggcgtagctgggctcattcgcgcagccaacccagacatatctgtcgcgcaagcccgtcagattctgcgggataccgcgcaagaagcaggatcgttcacacagtacggctatggaatcgtcgatgctcatgccgccgttgttgctgcatccggtggtagcggcggc

SEQ ID NO: 422 - protein, 413 aa, synthetic construct
  REGION 1..413: note = Variant of serine peptidase from Bacillus sinesaloumensis
MADQASQANGNQDVIEGELIVSVEPKNGKPDVSIQSAQSVTGQEDVLKSKGFTIVDTLHVEDSSVKPLVSKNFNKKVVEKMGLVYLVQYSPDQFKSSNIAKKELRKELMDLGFKVRYISENYKMMAIEGTATLQAVHPNQQWHYNMIKAPEAWAITSGSSSVKVAVLDTGIDHNHPSLANFVNTNLGRSFVGGNTMDVQGHGTHVAGTIASYGSVSGVMQSATLIPVKVLDNSGSGSLYGITQGILYAADIDADVINMSLGGGGGNQSMDEAVQTAVAQGTIVVAATGNDGASSISYPAAYSSVIAVGSVDSNRTRSSFSNYGSGLEVMAPGSNIYSTYPNSRYTSLSGTSMATPHVAGVAGLIRAANPDISVAQARQILRDTAQEAGSFTQYGYGIVDAHAAVVAASGGSGG

SEQ ID NO: 423 - DNA, 1239 bp, synthetic construct
  misc_feature 1..1239: note = Variant of serine peptidase from Bacillus sinesaloumensis
  source 1..1239: mol_type = other DNA
atggcagatcaagctagtcaagctaatggaaaccaggacgtcattgaaggcgagctgatcgtttcagtggaaccgaagaacggtaaacctgatgtgagcattcaaagtgcacaatccgtaacagggcaggaagacgtccttaaatcgaaaggctttacgatcgttgataccttgcatgtagaggatagcagcgtcaagccactcgtctcgaagaatttcaataagaaagtggtggagaagatgggactggtgtatcttgttcaatactctccggaccagtttaaaagttccaacattgcgaagaaagaactcagaaaagaattgatggatctgggctttaaagtccgctatataagcgaaaattacaagatgatggcgatcgaaggtacagccactcttcaggcagtacaccctaaccaaaactggcattataatatgattaaagctccggaagcgtgggctattacgtctggatcctctagcgttaaagtagcagtcctggatacagggatcgaccataatcacccatccttggccaacttcgtgaatactaatcttggccggtcgtttgttggaggaaacaccatggatggccaaggtcatggcacacatgttgctggcacgattgcatcttatgggagtgtaagcggagtgatgcagagtgcgacactgatcccggtcaaagtgctcgataattctggcagcgggtccctttacggtattacgcaaggcatattgtatgccgccgacatcgatgcggacgtcattaacatgtctctgggtggaggaggctataatcagagcatggatgaggctgttcaaacagcagttgctaaaggaaccattgtagtagcagcgactggcaatgatggtgcatcgtcgatcagttatcctgctgcctacagcagcgtcattgcggtgggatctgtgacgtccaatcgtacacgatcctcgttttctaactatggatctgggcttgaagttatggcaccgggcagcaacatctacagtacgtatcctaattccagatatacatctttgagtggtacaagcatggctactccgcacgttgcgggcgtagctgggctcattcgcgcagccaacccagacatatctgtcgcgcaagcccgtcagattctgcgggataccgcgcaagaagcaggatcgttcacacagtacggctatggaatcgtcgatgctcatgccgccgttgttgctgcatccggtggtagcggcggc

SEQ ID NO: 424 - protein, 413 aa, synthetic construct
  REGION 1..413: note = Variant of serine peptidase from Bacillus sinesaloumensis
MADQASQANGNQDVIEGELIVSVEPKNGKPDVSIQSAQSVTGQEDVLKSKGFTIVDTLHVEDSSVKPLVSKNFNKKVVEKMGLVYLVQYSPDQFKSSNIAKKELRKELMDLGFKVRYISENYKMMAIEGTATLQAVHPNQNWHYNMIKAPEAWAITSGSSSVKVAVLDTGIDHNHPSLANFVNTNLGRSFVGGNTMDGQGHGTHVAGTIASYGSVSGVMQSATLIPVKVLDNSGSGSLYGITQGILYAADIDADVINMSLGGGGYNQSMDEAVQTAVAKGTIVVAATGNDGASSISYPAAYSSVIAVGSVTSNRTRSSFSNYGSGLEVMAPGSNIYSTYPNSRYTSLSGTSMATPHVAGVAGLIRAANPDISVAQARQILRDTAQEAGSFTQYGYGIVDAHAAVVAASGGSGG

SEQ ID NO: 425 - DNA, 1239 bp, synthetic construct
  misc_feature 1..1239: note = Variant of serine peptidase from Bacillus sinesaloumensis
  source 1..1239: mol_type = other DNA
atggcagatcaagctagtcaagctaatggaaaccaggacgtcattgaaggcgagctgatcgtttcagtggaaccgaagaacggtaaacctgatgtgagcattcaaagtgcacaatccgtaacagggcaggaagacgtccttaaatcgaaaggctttacgatcgttgataccttgcatgtagaggatagcagcgtcaagccactcgtctcgaagaatttcaataagaaagtggtggagaagatgggactggtgtatcttgttcaatactctccggaccagtttaaaagttccaacattgcgaagaaagaactcagaaaagaattgatggatctgggctttaaagtccgctatataagcgaaaattacaagatgatggcgatcgaaggtacagccactcttcaggcagtacaccctaaccaaaactggcattataatatgattaaagctccggaagcgtgggctattacgtctggatcctctagcgttaaagtagcagtcctggatacagggatcgaccataatcacccatccttggccaacttcgtgaatactaatcttggccggtcgtttgttggaggaaacaccatggatgttcaaggtcatggcacacatgttgctggcacgattgcatcttatgggagtgtaagcggagtgatgcagagtgcgacactgatcccggtcaaagtgctcgataattctggcagcgggtccctttacggtattacgcaaggcatattgtatgccgccgacatcgatgcggacgtcattaacatgtctctgggtggaggaggctacaatcagagcatggatgaggctgttcaaacagcagttgctcagggaaccattgtagtagcagcgactggcaatgatggtgcatcgtcgatcagttatcctgctgcctacagcagcgtcattgcggtgggatctgtgacgtccaatcgtacacgttcctcgttttctaactatggatctgggcttgaagttatggcaccgggcagcaacatctacagtacgtatcctaattccagatatacatctttgagtggtacaagcatggctactccgcacgttgcgggcgtagctgggctcattcgcgcagccaacccagacatatctgtcgcgcaagcccgtcagattctgcgggataccgcgcaagaagcaggatcgttcacatactacggctatggaatcgtcgatgctcatgccgccgttgttgctgcatccggtggtagcggcggc

SEQ ID NO: 426 - protein, 413 aa, synthetic construct
  REGION 1..413: note = Variant of serine peptidase from Bacillus sinesaloumensis
MADQASQANGNQDVIEGELIVSVEPKNGKPDVSIQSAQSVTGQEDVLKSKGFTIVDTLHVEDSSVKPLVSKNFNKKVVEKMGLVYLVQYSPDQFKSSNIAKKELRKELMDLGFKVRYISENYKMMAIEGTATLQAVHPNQNWHYNMIKAPEAWAITSGSSSVKVAVLDTGIDHNHPSLANFVNTNLGRSFVGGNTMDVQGHGTHVAGTIASYGSVSGVMQSATLIPVKVLDNSGSGSLYGITQGILYAADIDADVINMSLGGGGYNQSMDEAVQTAVAQGTIVVAATGNDGASSISYPAAYSSVIAVGSVTSNRTRSSFSNYGSGLEVMAPGSNIYSTYPNSRYTSLSGTSMATPHVAGVAGLIRAANPDISVAQARQILRDTAQEAGSFTYYGYGIVDAHAAVVAASGGSGG

SEQ ID NO: 427 - DNA, 1239 bp, synthetic construct
  misc_feature 1..1239: note = Variant of serine peptidase from Bacillus sinesaloumensis
  source 1..1239: mol_type = other DNA
atggcagatcaagctagtcaagctaatggaaaccaggacgtcattgaaggcgagctgatcgtttcagtggaaccgaagaacggtaaacctgatgtgagcattcaaagtgcacaatccgtaacagggcaggaagacgtccttaaatcgaaaggctttacgatcgttgataccttgcatgtagaggatagcagcgtcaagccactcgtctcgaagaatttcaataagaaagtggtggagaagatgggactggtgtatcttgttcaatactctccggaccagtttaaaagttccaacattgcgaagaaagaactcagaaaagaattgatggatctgggctttaaagtccgctatataagcgaaaattacaagatgatggcgatcgaaggtacagccactcttcaggcagtacaccctaaccaaaactggcattataatatgattaaagctccggaagcgtgggctattacgtctggatcctctagcgttaaagtagcagtcctggatacagggatcgaccataatcacccatccttggccaacttcgtgaatactaatcttggccggtcgtttgttggaggaaacaccatggatgttcaaggtcatggcacacatgttgctggcacgattgcatcttatgggagtgtaagcggagtgatgcagagtgcgacactgatcccggtcaaagtgctcgataattctggcagcgggtccctttacggtattacgcaaggcatattgtatgccgccgacatcgatgcggacgtcattaacatgtctctgggtggaggaggctataatcagagcatggatgaggctgttcaaacagcagttgctcagggaaccattgtagtagcagcgactggcaatgatggtgcatcgtcgatcagttatcctgctgcctacagcagcgtcattgcggtgggatctgtgacgtccaatcgtacacgttcctcgttttctaactatggatctgggcttgaagttatggcaccgggcagcaacatctacagtacgtatcctaataacagatatacatctttgagtggtacaagcatggctactccgcacgttgcgggcgtagctgggctcattcgcgcagccaacccaggcatatctgtcgcgcaagcccgtcagattctgcgggataccgcgcaagaagcaggatcgttcacatactacggctatggaatcgtcgatgctcatgccgccgttgttgctgcatccggtggtagcggcggc

SEQ ID NO: 428 - protein, 413 aa, synthetic construct
  REGION 1..413: note = Variant of serine peptidase from Bacillus sinesaloumensis
MADQASQANGNQDVIEGELIVSVEPKNGKPDVSIQSAQSVTGQEDVLKSKGFTIVDTLHVEDSSVKPLVSKNFNKKVVEKMGLVYLVQYSPDQFKSSNIAKKELRKELMDLGFKVRYISENYKMMAIEGTATLQAVHPNQNWHYNMIKAPEAWAITSGSSSVKVAVLDTGIDHNHPSLANFVNTNLGRSFVGGNTMDVQGHGTHVAGTIASYGSVSGVMQSATLIPVKVLDNSGSGSLYGITQGILYAADIDADVINMSLGGGGYNQSMDEAVQTAVAQGTIVVAATGNDGASSISYPAAYSSVIAVGSVTSNRTRSSFSNYGSGLEVMAPGSNIYSTYPNNRYTSLSGTSMATPHVAGVAGLIRAANPGISVAQARQILRDTAQEAGSFTYYGYGIVDAHAAVVAASGGSGG

SEQ ID NO: 429 - DNA, 1239 bp, synthetic construct
  misc_feature 1..1239: note = Variant of serine peptidase from Bacillus sinesaloumensis
  source 1..1239: mol_type = other DNA
atggcagatcaagctagtcaagctaatggaaaccaggacgtcattgaaggcgagctgatcgtttcagtggaaccgaagaacggtaaacctgatgtgagcattcaaagtgcacaatccgtaacagggcaggaagacgtccttaaatcgaaaggctttacgatcgttgataccttgcatgtagaggatagcagcgtcaagccactcgtctcgaagaatttcaataagaaagtggtggagaagatgggactggtgtatcttgttcaatactctccggaccagtttaaaagttccaacattgcgaagaaagaactcagaaaagaattgatggatctgggctttaaagtccgctatataagcgaaaattacaagatgatggcgatcgaaggtacagccactcttcaggcagtacaccctaaccaacaatggcattataatatgattaaagctccggaagcgtgggctattacgtctggatcctctagcgttaaagtagcagtcctggatacagggatcgaccataatcacccatccttggccaacttcgtgaatactaatcttggccggtcgtttgttggcggaaacaccatggatggccaaggtcatggcacacatgttgctggcacgattgcatcttatgggagtgtaagcggagtgatgcagagtgcgacactgatcccggtcaaagtgctcgataattctggcagcgggtccctttacggtattacgcaaggcatattgtatgccgccgacatcgatgcggacgtcattaacatgtctctgggtggaggaggcggtaatcagagcatggatgaggctgttcaaacagcagttgctcagggaaccattgtagtagcagcgactggcaatgatggtgcatcgtcgatcagttatcctgctgcctacagcagcgtcattgcggtgggatctgtgacgtccaatcgtacacgatcctcgttttctaactatggatctgggcttgaagttatggcaccgggcagcaacatctacagtacgtatcctaattccagatatacatctttgagtggtacaagcatggctactccgcacgttgcgggcgtagctgggctcattcgcgcagccaacccagacatatctgtcgcgcaagcccgtcagattctgcgggataccgcgcaagaagcaggatcgttcacacaatacggctatggaatcgtcgatgctcatgccgccgttgttgctgcatccggtggtagcggcggc

SEQ ID NO: 430 - protein, 413 aa, synthetic construct
  REGION 1..413: note = Variant of serine peptidase from Bacillus sinesaloumensis
MADQASQANGNQDVIEGELIVSVEPKNGKPDVSIQSAQSVTGQEDVLKSKGFTIVDTLHVEDSSVKPLVSKNFNKKVVEKMGLVYLVQYSPDQFKSSNIAKKELRKELMDLGFKVRYISENYKMMAIEGTATLQAVHPNQQWHYNMIKAPEAWAITSGSSSVKVAVLDTGIDHNHPSLANFVNTNLGRSFVGGNTMDGQGHGTHVAGTIASYGSVSGVMQSATLIPVKVLDNSGSGSLYGITQGILYAADIDADVINMSLGGGGGNQSMDEAVQTAVAQGTIVVAATGNDGASSISYPAAYSSVIAVGSVTSNRTRSSFSNYGSGLEVMAPGSNIYSTYPNSRYTSLSGTSMATPHVAGVAGLIRAANPDISVAQARQILRDTAQEAGSFTQYGYGIVDAHAAVVAASGGSGG

SEQ ID NO: 431 - DNA, 1239 bp, synthetic construct
  misc_feature 1..1239: note = Variant of serine peptidase from Bacillus sinesaloumensis
  source 1..1239: mol_type = other DNA
atggcagatcaagctagtcaagctaatggaaaccaggacgtcattgaaggcgagctgatcgtttcagtggaaccgaagaacggtaaacctgatgtgagcattcaaagtgcacaatccgtaacagggcaggaagacgtccttaaatcgaaaggctttacgatcgttgataccttgcatgtagaggatagcagcgtcaagccactcgtctcgaagaatttcaataagaaagtggtggagaagatgggactggtgtatcttgttcaatactctccggaccagtttaaaagttccaacattgcgaagaaagaactcagaaaagaattgatggatctgggctttaaagtccgctatataagcgaaaattacaagatgatggcgatcgaaggtacagccactcttcaggcagtacaccctaaccaaaactggcattataatatgattaaagctccggaagcgtgggctattacgtctggatcctctagcgttaaagtagcagtcctggatacagggatcgaccataatcacccatccttggccaacttcgtgaatactaatcttggccggtcgtttgttggaggaaacaccatggatgttcaaggtcatggcacacatgttgctggcacgattgcatcttatgggagtgtaagcggagtgatgcagagtgcgacactgatcccggtcaaagtgctcgataattctggcagcgggtccctttacggtattacgcaaggcatattgtatgccgccgacatcgatgcggacgtcattaacatgtctctgggtggaggaggcggtaatcagagcatggatgaggctgttcaaacagcagttgctcaaggaaccattgtagtagcagcgactggcaatgatggtgcatcgtcgatcagttatcctgctgcctacagcagcgtcattgcggtgggatctgtgacgtccaatcgtacacgttcctcgttttctaactatggatctgggcttgaagttatggcaccgggcagcaacatctacagtacgtatcctaattccagatatacatctttgagtggtacaagcatggctactccgcacgttgcgggcgtagctgggctcattcgcgcagccaacccagacatatctgtcgcgcaagcccgtcagattctgcgggataccgcgcaagaagcaggatcgttcacatactacggctatggaatcgtcgatgctcatgccgccgttgttgctgcatccggtggtagcggcggc

SEQ ID NO: 432 - protein, 413 aa, synthetic construct
  REGION 1..413: note = Variant of serine peptidase from Bacillus sinesaloumensis
MADQASQANGNQDVIEGELIVSVEPKNGKPDVSIQSAQSVTGQEDVLKSKGFTIVDTLHVEDSSVKPLVSKNFNKKVVEKMGLVYLVQYSPDQFKSSNIAKKELRKELMDLGFKVRYISENYKMMAIEGTATLQAVHPNQNWHYNMIKAPEAWAITSGSSSVKVAVLDTGIDHNHPSLANFVNTNLGRSFVGGNTMDVQGHGTHVAGTIASYGSVSGVMQSATLIPVKVLDNSGSGSLYGITQGILYAADIDADVINMSLGGGGGNQSMDEAVQTAVAQGTIVVAATGNDGASSISYPAAYSSVIAVGSVTSNRTRSSFSNYGSGLEVMAPGSNIYSTYPNSRYTSLSGTSMATPHVAGVAGLIRAANPDISVAQARQILRDTAQEAGSFTYYGYGIVDAHAAVVAASGGSGG

SEQ ID NO: 433 - DNA, 1239 bp, synthetic construct
  misc_feature 1..1239: note = Variant of serine peptidase from Bacillus sinesaloumensis
  source 1..1239: mol_type = other DNA
atggcagatcaagctagtcaagctaatggaaaccaggacgtcattgaaggcgagctgatcgtttcagtggaaccgaagaacggtaaacctgatgtgagcattcaaagtgcacaatccgtaacagggcaggaagacgtccttaaatcgaaaggctttacgatcgttgataccttgcatgtagaggatagcagcgtcaagccactcgtctcgaagaatttcaataagaaagtggtggagaagatgggactggtgtatcttgttcaatactctccggaccagtttaaaagttccaacattgcgaagaaagaactcagaaaagaattgatggatctgggctttaaagtccgctatataagcgaaaattacaagatgatggcgatcgaaggtacagccactcttcaggcagtacaccctaaccaaaactggcattataatatgattaaagctccggaagcgtgggctattacgtctggatcctctagcgttaaagtagcagtcctggatacagggatcgaccataatcacccatccttggccaacttcgtgaatactaatctgggccggtcgtttgttggaggaaacaccatggatgttcaaggtcatggcacacatgttgctggcacgattgcatcttatgggagtgtaagcggagtgatgcagagtgcgacactgatcccggtcaaagtgctcgataattctggcagcgggtccctttacggtattacgcaaggcatattgtatgccgccgacatcgatgcggacgtcattaacatgtctctgggtggaggaggcggtaatcagagcatggatgaggctgttcaaacagcagttgctcagggaaccattgtagtagcagcgactggcaatgatggtgcatcgtcgatcagttatcctgctgcctacagcagcgtcattgcggtgggatctgtgacgtccaatcgtacacgatcctcgttttctaactatggatctgggcttgaagttatggcaccgggcagcaacatctacagtacgtatcctaattccagatatacatctttgagtggtacaagcatggctactccgcacgttgcgggcgtagctgggctcattcgcgcagccaacccagacatatctgtcgcgcaagcccgtcagattctgcgggataccgcgcaagaagcaggatcgttcacacaatacggctatggaatcgtcgatgctcatgccgccgttgttgctgcatccggtggtagcggcggc

SEQ ID NO: 434 - protein, 413 aa, synthetic construct
  REGION 1..413: note = Variant of serine peptidase from Bacillus sinesaloumensis
MADQASQANGNQDVIEGELIVSVEPKNGKPDVSIQSAQSVTGQEDVLKSKGFTIVDTLHVEDSSVKPLVSKNFNKKVVEKMGLVYLVQYSPDQFKSSNIAKKELRKELMDLGFKVRYISENYKMMAIEGTATLQAVHPNQNWHYNMIKAPEAWAITSGSSSVKVAVLDTGIDHNHPSLANFVNTNLGRSFVGGNTMDVQGHGTHVAGTIASYGSVSGVMQSATLIPVKVLDNSGSGSLYGITQGILYAADIDADVINMSLGGGGGNQSMDEAVQTAVAQGTIVVAATGNDGASSISYPAAYSSVIAVGSVTSNRTRSSFSNYGSGLEVMAPGSNIYSTYPNSRYTSLSGTSMATPHVAGVAGLIRAANPDISVAQARQILRDTAQEAGSFTQYGYGIVDAHAAVVAASGGSGG

SEQ ID NO: 435 - DNA, 1239 bp, synthetic construct
  misc_feature 1..1239: note = Variant of serine peptidase from Bacillus sinesaloumensis
  source 1..1239: mol_type = other DNA
atggcagatcaagctagtcaagctaatggaaaccaggacgtcattgaaggcgagctgatcgtttcagtggaaccgaagaacggtaaacctgatgtgagcattcaaagtgcacaatccgtaacagggcaggaagacgtccttaaatcgaaaggctttacgatcgttgataccttgcatgtagaggatagcagcgtcaagccactcgtctcgaagaatttcaataagaaagtggtggagaagatgggactggtgtatcttgttcaatactctccggaccagtttaaaagttccaacattgcgaagaaagaactcagaaaagaattgatggatctgggctttaaagtccgctatataagcgaaaattacaagatgatggcgatcgaaggtacagccactcttcagctggtacaccctaaccaaaactggcattataatatgattaaagctccggaagcgtgggctattacgtctggatcctctagcgttaaagtagcagtcctggatacagggatcgaccataatcacccatccttggccaacttcgtgaatactaatcttggccggtcgtttgttggaggaaacaccatggatgttcaaggtcatggcacacatgttgctggcacgattgcatcttatgggagtgtaagcggagtgatgcagagtgcgacactgatcccggtcaaagtgctcgataattctggcagcgggtccctttacggtattacgcaaggcatattgtatgccgccgacatcgatgcggacgtcattaacatgtctctgggtggaggaggctataatcagagcatggatgaggctgttcaaacagcagttgctcagggaaccattgtagtagcagcgactggcaatgatggtgcatcgtcgatcagttatcctgctgcctacagcagcgtcattgcggtgggatctgtgacgtccaatcgtacacgatcctcgttttctaactatggatctgggcttgaagttatggcaccgggcagcaacatctacagtacgtatcctaattccagatatacatctttgagtggtacaagcatggctactccgcacgttgcgggcgtagctgggctcattcgcgcagccaacccagacatatctgtcgcgcaagcccgtcagattctgcgggataccgcgcaagaagcaggatcgttcacacagtacggctatggaatcgtcgatgctcatgccgccgttgttgctgcatccggtggtagcggcggc

SEQ ID NO: 436 - protein, 413 aa, synthetic construct
  REGION 1..413: note = Variant of serine peptidase from Bacillus sinesaloumensis
MADQASQANGNQDVIEGELIVSVEPKNGKPDVSIQSAQSVTGQEDVLKSKGFTIVDTLHVEDSSVKPLVSKNFNKKVVEKMGLVYLVQYSPDQFKSSNIAKKELRKELMDLGFKVRYISENYKMMAIEGTATLQLVHPNQNWHYNMIKAPEAWAITSGSSSVKVAVLDTGIDHNHPSLANFVNTNLGRSFVGGNTMDVQGHGTHVAGTIASYGSVSGVMQSATLIPVKVLDNSGSGSLYGITQGILYAADIDADVINMSLGGGGYNQSMDEAVQTAVAQGTIVVAATGNDGASSISYPAAYSSVIAVGSVTSNRTRSSFSNYGSGLEVMAPGSNIYSTYPNSRYTSLSGTSMATPHVAGVAGLIRAANPDISVAQARQILRDTAQEAGSFTQYGYGIVDAHAAVVAASGGSGG

SEQ ID NO: 437 - DNA, 1239 bp, synthetic construct
  misc_feature 1..1239: note = Variant of serine peptidase from Bacillus sinesaloumensis
  source 1..1239: mol_type = other DNA
atggcagatcaagctagtcaagctaatggaaaccaggacgtcattgaaggcgagctgatcgtttcagtggaaccgaagaacggtaaacctgatgtgagcattcaaagtgcacaatccgtaacagggcaggaagacgtccttaaatcgaaaggctttacgatcgttgataccttgcatgtagaggatagcagcgtcaagccactcgtctcgaagaatttcaataagaaagtggtggagaagatgggactggtgtatcttgttcaatactctccggaccagtttaaaagttccaacattgcgaagaaagaactcagaaaagaattgatggatctgggctttaaagtccgctatataagcgaaaattacaagatgatggcgatcgaaggtacagccactcttcaggcagtacaccctaaccaaaactggcattataatatgattaaagctccggaagcgtgggctattacgtctggatcctctagcgttaaagtagcagtcctggatacagggatcgaccataatcacccatccttggccaacttcgtgaatactaatcttggccggtcgtttgttggaggattgaccatggatgttcaaggtcatggcacacatgttgctggcacgattgcatcttatgggagtgtaagcggagtgatgcagagtgcgacactgatcccggtcaaagtgctcgataattctggcagcgggtccctttacggtattacgcaaggcatattgtatgccgccgacatcgatgcggacgtcattaacatgtctctgggtggaggaggctataatcagagcatggatgaggctgttcaaacagcagttgctcagggaaccattgtagtagcagcgactggcaatgatggtgcatcgtcgatcagttatcctgctgcctacagcagcgtcattgcggtgggatctgtgacgtccaatcgtacacgatcctcgttttctaactatggatctgggcttgaagttatggcaccgggcagcaacatctacagtacgtatcctaattccagatatacatctttgagtggtacaagcatggctactccgcacgttgcgggcgtagctgggctcattcgcgcagccaacccagacatatctgtcgcgcaagcccgtcagattctgcgggataccgcgcaagaagcaggatcgttcacacagtacggctatggaatcgtcgatgctcatgccgccgttgttgctgcatccggtggtagcggcggc

SEQ ID NO: 438 - protein, 413 aa, synthetic construct
  REGION 1..413: note = Variant of serine peptidase from Bacillus sinesaloumensis
MADQASQANGNQDVIEGELIVSVEPKNGKPDVSIQSAQSVTGQEDVLKSKGFTIVDTLHVEDSSVKPLVSKNFNKKVVEKMGLVYLVQYSPDQFKSSNIAKKELRKELMDLGFKVRYISENYKMMAIEGTATLQAVHPNQNWHYNMIKAPEAWAITSGSSSVKVAVLDTGIDHNHPSLANFVNTNLGRSFVGGLTMDVQGHGTHVAGTIASYGSVSGVMQSATLIPVKVLDNSGSGSLYGITQGILYAADIDADVINMSLGGGGYNQSMDEAVQTAVAQGTIVVAATGNDGASSISYPAAYSSVIAVGSVTSNRTRSSFSNYGSGLEVMAPGSNIYSTYPNSRYTSLSGTSMATPHVAGVAGLIRAANPDISVAQARQILRDTAQEAGSFTQYGYGIVDAHAAVVAASGGSGG

SEQ ID NO: 439 - DNA, 1239 bp, synthetic construct
  misc_feature 1..1239: note = Variant of serine peptidase from Bacillus sinesaloumensis
  source 1..1239: mol_type = other DNA
atggcagatcaagctagtcaagctaatggaaaccaggacgtcattgaaggcgagctgatcgtttcagtggaaccgaagaacggtaaacctgatgtgagcattcaaagtgcacaatccgtaacagggcaggaagacgtccttaaatcgaaaggctttacgatcgttgataccttgcatgtagaggatagcagcgtcaagccactcgtctcgaagaatttcaataagaaagtggtggagaagatgggactggtgtatcttgttcaatactctccggaccagtttaaaagttccaacattgcgaagaaagaactcagaaaagaattgatggatctgggctttaaagtccgctatataagcgaaaattacaagatgatggcgatcactggtacagccactcttcaggcagtacaccctaaccaaaactggcattataatatgattaaagctccggaagcgtgggctattacgtctggatcctctagcgttaaagtagcagtcctggatacagggatcgaccataatcacccatccttggccaacttcgtgaatactaatcttggccggtcgtttgttggaggaaacaccatggatgttcaaggtcatggcacacatgttgctggcacgattgcatcttatgggagtgtaagcggagtgatgcagagtgcgacactgatcccggtcaaagtgctcgataattctggcagcgggtccctttacggtattacgcaaggcatattgtatgccgccgacatcgatgcggacgtcattaacatgtctctgggtggaggaggctataatcagagcatggatgaggctgttcaaacagcagttgctcagggaaccattgtagtagcagcgactggcaatgatggtgcatcgtcgatcagttatcctgctgcctacagcagcgtcattgcggtgggatctgtgacgtccaatcgtacacgatcctcgttttctaactatggatctgggcttgaagttatggcaccgggcagcaacatctacagtacgtatcctaattccagatatacatctttgagtggtacaagcatggctactccgcacgttgcgggcgtagctgggctcattcgcgcagccaacccagacatatctgtcgcgcaagcccgtcagattctgcgggataccgcgcaagaagcaggatcgttcacacagtacggctatggaatcgtcgatgctcatgccgccgttgttgctgcatccggtggtagcggcggc

SEQ ID NO: 440 - protein, 413 aa, synthetic construct
  REGION 1..413: note = Variant of serine peptidase from Bacillus sinesaloumensis
MADQASQANGNQDVIEGELIVSVEPKNGKPDVSIQSAQSVTGQEDVLKSKGFTIVDTLHVEDSSVKPLVSKNFNKKVVEKMGLVYLVQYSPDQFKSSNIAKKELRKELMDLGFKVRYISENYKMMAITGTATLQAVHPNQNWHYNMIKAPEAWAITSGSSSVKVAVLDTGIDHNHPSLANFVNTNLGRSFVGGNTMDVQGHGTHVAGTIASYGSVSGVMQSATLIPVKVLDNSGSGSLYGITQGILYAADIDADVINMSLGGGGYNQSMDEAVQTAVAQGTIVVAATGNDGASSISYPAAYSSVIAVGSVTSNRTRSSFSNYGSGLEVMAPGSNIYSTYPNSRYTSLSGTSMATPHVAGVAGLIRAANPDISVAQARQILRDTAQEAGSFTQYGYGIVDAHAAVVAASGGSGG

SEQ ID NO: 441 - DNA, 1239 bp, synthetic construct
  misc_feature 1..1239: note = Variant of serine peptidase from Bacillus sinesaloumensis
  source 1..1239: mol_type = other DNA
atggcagatcaagctagtcaagctaatggaaaccaggacgtcattgaaggcgagctgatcgtttcagtggaaccgaagaacggtaaacctgatgtgagcattcaaagtgcacaatccgtaacagggcaggaagacgtccttaaatcgaaaggctttacgatcgttgataccttgcatgtagaggatagcagcgtcaagccactcgtctcgaagaatttcaataagaaagtggtggagaagatgggactggtgtatcttgttcaatactctccggaccagtttaaaagttccaacattgcgaagaaagaactcagaaaagaattgatggatctgggctttaaagtccgctatataagcgaaaattacaagatgatggcgatcgaaggtacagccactcttagtgcagtacaccctaaccaaaactggcattataatatgattaaagctccggaagcgtgggctattacgtctggatcctctagcgttaaagtagcagtcctggatacagggatcgaccataatcacccatccttggccaacttcgtgaatactaatcttggccggtcgtttgttggaggaaacaccatggatgttcaaggtcatggcacacatgttgctggcacgattgcatcttatgggagtgtaagcggagtgatgcagagtgcgacactgatcccggtcaaagtgctcgataattctggcagcgggtccctttacggtattacgcaaggcatattgtatgccgccgacatcgatgcggacgtcattaacatgtctctgggtggaggaggctataatcagagcatggatgaggctgttcaaacagcagttgctcagggaaccattgtagtagcagcgactggcaatgatggtgcatcgtcgatcagttatcctgctgcctacagcagcgtcattgcggtgggatctgtgacgtccaatcgtacacgatcctcgttttctaactatggatctgggcttgaagttatggcaccgggcagcaacatctacagtacgtatcctaattccagatatacatctttgagtggtacaagcatggctactccgcacgttgcgggcgtagctgggctcattcgcgcagccaacccagacatatctgtcgcgcaagcccgtcagattctgcgggataccgcgcaagaagcaggatcgttcacacagtacggctatggaatcgtcgatgctcatgccgccgttgttgctgcatccggtggtagcggcggc

SEQ ID NO: 442 - protein, 413 aa, synthetic construct
  REGION 1..413: note = Variant of serine peptidase from Bacillus sinesaloumensis
MADQASQANGNQDVIEGELIVSVEPKNGKPDVSIQSAQSVTGQEDVLKSKGFTIVDTLHVEDSSVKPLVSKNFNKKVVEKMGLVYLVQYSPDQFKSSNIAKKELRKELMDLGFKVRYISENYKMMAIEGTATLSAVHPNQNWHYNMIKAPEAWAITSGSSSVKVAVLDTGIDHNHPSLANFVNTNLGRSFVGGNTMDVQGHGTHVAGTIASYGSVSGVMQSATLIPVKVLDNSGSGSLYGITQGILYAADIDADVINMSLGGGGYNQSMDEAVQTAVAQGTIVVAATGNDGASSISYPAAYSSVIAVGSVTSNRTRSSFSNYGSGLEVMAPGSNIYSTYPNSRYTSLSGTSMATPHVAGVAGLIRAANPDISVAQARQILRDTAQEAGSFTQYGYGIVDAHAAVVAASGGSGG

SEQ ID NO: 443 - DNA, 1239 bp, synthetic construct
  misc_feature 1..1239: note = Variant of serine peptidase from Bacillus sinesaloumensis
  source 1..1239: mol_type = other DNA
atggcagatcaagctagtcaagctaatggaaaccaggacgtcattgaaggcgagctgatcgtttcagtggaaccgaagaacggtaaacctgatgtgagcattcaaagtgcacaatccgtaacagggcaggaagacgtccttaaatcgaaaggctttacgatcgttgataccttgcatgtagaggatagcagcgtcaagccactcgtctcgaagaatttcaataagaaagtggtggagaagatgggactggtgtatcttgttcaatactctccggaccagtttaaaagttccaacattgcgaagaaagaactcagaaaagaattgatggatctgggctttaaagtccgctatataagcgaaaattacaagatgatggcgatcgaaggtacagccactcttcaggcagtacaccctaaccaaaactggcattataatatgattaaagctccggaagcgtgggctattacgtctggatcctctagcgttaaagtagcagtcctggatacagggatcgaccataatcacccatccttggccaacttcgtgaatactaatcttggccggtcgtttgttggaggaaacaccatggatgttcaaggtcatggcacacatgttgctggcacgattgcatcttatgggagtgtaagcggagtgatgcagagtgcgacactgatcccggtcaaagtgctcgataattctggcagcgggtccctttacggtattacgcaaggcatattgtatgccgccgacatcgatgcggacgtcattaacatgtctctgggtggaggaggctataatcagagcatggatgaggctgttcaaacagcagttgctcagggaaccattgtagtagcagcgactggcaatgatggtgcatcgtcgatcagttatcctgctgcctacagcagcgtcattgcggtgggatctgtgacgtccacgcgtacacgatcctcgttttctaactatggatctgggcttgaagttatggcaccgggcagcaacatctacagtacgtatcctaattccagatatacatctttgagtggtacaagcatggctactccgcacgttgcgggcgtagctgggctcattcgcgcagccaacccagacatatctgtcgcgcaagcccgtcagattctgcgggataccgcgcaagaagcaggatcgttcacacagtacggctatggaatcgtcgatgctcatgccgccgttgttgctgcatccggtggtagcggcggc

SEQ ID NO: 444 - protein, 413 aa, synthetic construct
  REGION 1..413: note = Variant of serine peptidase from Bacillus sinesaloumensis
MADQASQANGNQDVIEGELIVSVEPKNGKPDVSIQSAQSVTGQEDVLKSKGFTIVDTLHVEDSSVKPLVSKNFNKKVVEKMGLVYLVQYSPDQFKSSNIAKKELRKELMDLGFKVRYISENYKMMAIEGTATLQAVHPNQNWHYNMIKAPEAWAITSGSSSVKVAVLDTGIDHNHPSLANFVNTNLGRSFVGGNTMDVQGHGTHVAGTIASYGSVSGVMQSATLIPVKVLDNSGSGSLYGITQGILYAADIDADVINMSLGGGGYNQSMDEAVQTAVAQGTIVVAATGNDGASSISYPAAYSSVIAVGSVTSTRTRSSFSNYGSGLEVMAPGSNIYSTYPNSRYTSLSGTSMATPHVAGVAGLIRAANPDISVAQARQILRDTAQEAGSFTQYGYGIVDAHAAVVAASGGSGG

SEQ ID NO: 445 - DNA, 1239 bp, synthetic construct
  misc_feature 1..1239: note = Variant of serine peptidase from Bacillus sinesaloumensis
  source 1..1239: mol_type = other DNA
atggcagatcaagctagtcaagctaatggaaaccaggacgtcattgaaggcgagctgatcgtttcagtggaaccgaagaacggtaaacctgatgtgagcattcaaagtgcacaatccgtaacagggcaggaagacgtccttaaatcgaaaggctttacgatcgttgataccttgcatgtagaggatagcagcgtcaagccactcgtctcgaagaatttcaataagaaagtggtggagaagatgggactggtgtatcttgttcaatactctccggaccagtttaaaagttccaacattgcgaagaaagaactcagaaaagaattgatggatctgggctttaaagtccgctatataagcgaaaattacaagatgatggcgatcgaaggtacagccactcttcaggcagtacaccctaaccaaaactggcattataatatgattaaagctccggaagcgtgggctattacgtctggatcctctagcgttaaagtagcagtcctggatacagggatcgaccataatcacccatccttggccaacttcgtgaatctgaatcttggccggtcgtttgttggaggaaacaccatggatgttcaaggtcatggcacacatgttgctggcacgattgcatcttatgggagtgtaagcggagtgatgcagagtgcgacactgatcccggtcaaagtgctcgataattctggcagcgggtccctttacggtattacgcaaggcatattgtatgccgccgacatcgatgcggacgtcattaacatgtctctgggtggaggaggctataatctgagcatggatgaggctgttcaaacagcagttgctcagggaaccattgtagtagcagcgactggcaatgatggtgcatcgtcgatcagttatcctgctgcctacagcagcgtcattgcggtgggatctgtgacgtccaatcgtacacgatcctcgttttctaactatggatctgggcttgaagttatggcaccgggcagcaacatctacagtacgtatcctaattccagatatacatctttgagtggtacaagcatggctactccgcacgttgcgggcgtagctgggctcattcgcgcagccaacccagacatatctgtcgcgcaagcccgtcagattctgcgggataccgcgcaagaagcaggatcgttcacacagtacggctatggaatcgtcgatgctcatgccgccgttgttgctgcatccggtggtagcggcggc

SEQ ID NO: 446 - protein, 413 aa, synthetic construct
  REGION 1..413: note = Variant of serine peptidase from Bacillus sinesaloumensis
MADQASQANGNQDVIEGELIVSVEPKNGKPDVSIQSAQSVTGQEDVLKSKGFTIVDTLHVEDSSVKPLVSKNFNKKVVEKMGLVYLVQYSPDQFKSSNIAKKELRKELMDLGFKVRYISENYKMMAIEGTATLQAVHPNQNWHYNMIKAPEAWAITSGSSSVKVAVLDTGIDHNHPSLANFVNLNLGRSFVGGNTMDVQGHGTHVAGTIASYGSVSGVMQSATLIPVKVLDNSGSGSLYGITQGILYAADIDADVINMSLGGGGYNLSMDEAVQTAVAQGTIVVAATGNDGASSISYPAAYSSVIAVGSVTSNRTRSSFSNYGSGLEVMAPGSNIYSTYPNSRYTSLSGTSMATPHVAGVAGLIRAANPDISVAQARQILRDTAQEAGSFTQYGYGIVDAHAAVVAASGGSGG

SEQ ID NO: 447 - DNA, 1239 bp, synthetic construct
  misc_feature 1..1239: note = Variant of serine peptidase from Bacillus sinesaloumensis
  source 1..1239: mol_type = other DNA
atggcagatcaagctagtcaagctaatggaaaccaggacgtcattgaaggcgagctgatcgtttcagtggaaccgaagaacggtaaacctgatgtgagcattcaaagtgcacaatccgtaacagggcaggaagacgtccttaaatcgaaaggctttacgatcgttgataccttgcatgtagaggatagcagcgtcaagccactcgtctcgaagaatttcaataagaaagtggtggagaagatgggactggtgtatcttgttcaatactctccggaccagtttaaaagttccaacattgcgaagaaagaactcagaaaagaattgatggatctgggctttaaagtccgctatataagcgaaaattacaagatgatggcgatcgaaggtacagccactcttcaggcagtacaccctaaccaaaactggcattataatatgattaaagctccggaagcgtgggctattacgtctggatcctctagcgttaaagtagcagtcctggatacagggatcgaccataatcacccatccttggccaacttcgtgaatactgagcttggccggtcgtttgttggaggaaacaccatggatgttcaaggtcatggcacacatgttgctggcacgattgcatcttatgggagtgtaagcggagtgatgcagagtgcgacactgatcccggtcaaagtgctcgataattctggcagcgggtccctttacggtattacgcaaggcatattgtatgccgccgacatcgatgcggacgtcattaacatgtctctgggtggaggaggctataatcagagcatggatgaggctgttcaaacagcagttgctcagggaaccattgtagtagcagcgactggcaatgatggtgcatcgtcgatcagttatcctgctgcctacagcagcgtcattgcggtgggatctgtgacgtccaatcgtacacgatcctcgttttctaactatggatctgggcttgaagttatggcaccgggcagcaacatctacagtacgtatcctaattccagatatacatctttgagtggtacaagcatggctactccgcacgttgcgggcgtagctgggctcattcgcgcagccaacccagacatatctgtcgcgcaagcccgtcagattctgcgggataccgcgcaagaagcaggatcgttcacacagtacggctatggaatcgtcgatgctcatgccgccgttgttgctgcatccggtggtagcggcggc

SEQ ID NO: 448 - protein, 413 aa, synthetic construct
  REGION 1..413: note = Variant of serine peptidase from Bacillus sinesaloumensis
MADQASQANGNQDVIEGELIVSVEPKNGKPDVSIQSAQSVTGQEDVLKSKGFTIVDTLHVEDSSVKPLVSKNFNKKVVEKMGLVYLVQYSPDQFKSSNIAKKELRKELMDLGFKVRYISENYKMMAIEGTATLQAVHPNQNWHYNMIKAPEAWAITSGSSSVKVAVLDTGIDHNHPSLANFVNTELGRSFVGGNTMDVQGHGTHVAGTIASYGSVSGVMQSATLIPVKVLDNSGSGSLYGITQGILYAADIDADVINMSLGGGGYNQSMDEAVQTAVAQGTIVVAATGNDGASSISYPAAYSSVIAVGSVTSNRTRSSFSNYGSGLEVMAPGSNIYSTYPNSRYTSLSGTSMATPHVAGVAGLIRAANPDISVAQARQILRDTAQEAGSFTQYGYGIVDAHAAVVAASGGSGG

SEQ ID NO: 449 - DNA, 1239 bp, synthetic construct
  misc_feature 1..1239: note = Variant of serine peptidase from Bacillus sinesaloumensis
  source 1..1239: mol_type = other DNA
atggcagatcaagctagtcaagctaatggaaaccaggacgtcattgaaggcgagctgatcgtttcagtggaaccgaagaacggtaaacctgatgtgagcattcaaagtgcacaatccgtaacagggcaggaagacgtccttaaatcgaaaggctttacgatcgttgataccttgcatgtagaggatagcagcgtcaagccactcgtctcgaagaatttcaataagaaagtggtggagaagatgggactggtgtatcttgttcaatactctccggaccagtttaaaagttccaacattgcgaagaaagaactcagaaaagaattgatggatctgggctttaaagtccgctatataagcgaaaattacaagatgatggcgatcgaaggtacagccactcttcaggcagtacaccctaaccaaaactggcattataatatgattaaagctccggaagcgtgggctattacgtctggatcctctagcgttaaagtagcagtcctggatacagggatcgaccataatcacccatccttggccaacttcgtgaatactaatcttggccggtcgtttgttggaggaaacaccatggatgttcaaggtcatggcacacatgttgctggcacgattgcatcttatgggagtgtaagcggagtgatgcagagtgcgacactgatcccggtcaaagtgctcgataattctggcagcgggtccctttacggtattacgcaaggcatattgtatgccgccgacatcgatgcggacgtcattaacatgtctctgggtggaggaggctataatcagagcatggatgaggctgttcaaacagcagttgctcagggaaccattgtagtagcagcgactggcaatgatggtgcatcgtcgatcagttatcctgctgcctacagcagcgtcattgcggtgggatctgtgacgtccaatcgtacacgatcctcgttttctaactatggatctgggcttgaagttatggcaccgggcagcaacatctacagtacgtatcctaatggtagatatacatctttgagtggtacaagcatggctactccgcacgttgcgggcgtagctgggctcattcgcgcagccaacccagacatatctgtcgcgcaagcccgtcagattctgcgggataccgcgcaagaagcaggatcgttcacacagtacggctatggaatcgtcgatgctcatgccgccgttgttgctgcatccggtggtagcggcggc

SEQ ID NO: 450 - protein, 413 aa, synthetic construct
  REGION 1..413: note = Variant of serine peptidase from Bacillus sinesaloumensis
MADQASQANGNQDVIEGELIVSVEPKNGKPDVSIQSAQSVTGQEDVLKSKGFTIVDTLHVEDSSVKPLVSKNFNKKVVEKMGLVYLVQYSPDQFKSSNIAKKELRKELMDLGFKVRYISENYKMMAIEGTATLQAVHPNQNWHYNMIKAPEAWAITSGSSSVKVAVLDTGIDHNHPSLANFVNTNLGRSFVGGNTMDVQGHGTHVAGTIASYGSVSGVMQSATLIPVKVLDNSGSGSLYGITQGILYAADIDADVINMSLGGGGYNQSMDEAVQTAVAQGTIVVAATGNDGASSISYPAAYSSVIAVGSVTSNRTRSSFSNYGSGLEVMAPGSNIYSTYPNGRYTSLSGTSMATPHVAGVAGLIRAANPDISVAQARQILRDTAQEAGSFTQYGYGIVDAHAAVVAASGGSGG

SEQ ID NO: 451 - DNA, 1239 bp, synthetic construct
  misc_feature 1..1239: note = Variant of serine peptidase from Bacillus sinesaloumensis
  source 1..1239: mol_type = other DNA
atggcagatcaagctagtcaagctaatggaaaccaggacgtcattgaaggcgagctgatcgtttcagtggaaccgaagaacggtaaacctgatgtgagcattcaaagtgcacaatccgtaacagggcaggaagacgtccttaaatcgaaaggctttacgatcgttgataccttgcatgtagaggatagcagcgtcaagccactcgtctcgaagaatttcaataagaaagtggtggagaagatgggactggtgtatcttgttcaatactctccggaccagtttaaaagttccaacattgcgaagaaagaactcagaaaagaattgatggatctgggctttaaagtccgctatataagcgaaaattacaagatgatggcgatcgaaggtacagccactcttcaggcagtacaccctaaccaaaactggcattataatatgattaaagctccggaagcgtgggctattacgtctggatcctctagcgttaaagtagcagtcctggatacagggatcgaccataatcacccatccttggccaacttcgtgaatactaatcttggccggtcgtttgttggaggaaacaccatggatgttcaaggtcatggcacacatgttgctggcacgattgcatcttatgggagtgtaagcggagtgatgcagagtgcgacactgatcccggtcaaagtgctcgataattctggcagcgggtccctttacggtattacgcaaggcatattgtatgccgccgacatcgatgcggacgtcattaacatgtctctgggtggaggaggctataatcagagcatggatgaggctgttcaaacagcagttgctcagggaaccattgtagtagcagcgactggcaatgatggtgcatcgtcgatcagttatcctgctgcctacagcagcgtcattgcggtgggatctgtgacgtccaatcgtacacgatcctcgttttctaactatggatctgggcttgaagttatggcaccgggcagcaacatctacagtacgtatcctaattccagatatacatctttgagtggtacaagcatggctactccgcacgttgcgggcgtagctgggctcattcgcgcagccaacccagacatatctgtctatcaagcccgtcagattctgcgggataccgcgcaagaagcaggatcgttcacacagtacggctatggaatcgtcgatgctcatgccgccgttgttgctgcatccggtggtagcggcggc

SEQ ID NO: 452 - protein, 413 aa, synthetic construct
  REGION 1..413: note = Variant of serine peptidase from Bacillus sinesaloumensis
MADQASQANGNQDVIEGELIVSVEPKNGKPDVSIQSAQSVTGQEDVLKSKGFTIVDTLHVEDSSVKPLVSKNFNKKVVEKMGLVYLVQYSPDQFKSSNIAKKELRKELMDLGFKVRYISENYKMMAIEGTATLQAVHPNQNWHYNMIKAPEAWAITSGSSSVKVAVLDTGIDHNHPSLANFVNTNLGRSFVGGNTMDVQGHGTHVAGTIASYGSVSGVMQSATLIPVKVLDNSGSGSLYGITQGILYAADIDADVINMSLGGGGYNQSMDEAVQTAVAQGTIVVAATGNDGASSISYPAAYSSVIAVGSVTSNRTRSSFSNYGSGLEVMAPGSNIYSTYPNSRYTSLSGTSMATPHVAGVAGLIRAANPDISVYQARQILRDTAQEAGSFTQYGYGIVDAHAAVVAASGGSGG

SEQ ID NO: 453 - DNA, 1239 bp, synthetic construct
  misc_feature 1..1239: note = Variant of serine peptidase from Bacillus sinesaloumensis
  source 1..1239: mol_type = other DNA
atggcagatcaagctagtcaagctaatggaaaccaggacgtcattgaaggcgagctgatcgtttcagtggaaccgaagaacggtaaacctgatgtgagcattcaaagtgcacaatccgtaacagggcaggaagacgtccttaaatcgaaaggctttacgatcgttgataccttgcatgtagaggatagcagcgtcaagccactcgtctcgaagaatttcaataagaaagtggtggagaagatgggactggtgtatcttgttcaatactctccggaccagtttaaaagttccaacattgcgaagaaagaactcagaaaagaattgatggatctgggctttaaagtccgctatataagcgaaaattacaagatgatggcgatcgaaggtacagccactcttcaggcagtacaccctaaccaacgttggcattataatatgattaaagctccggaagcgtgggctattacgtctggatcctctagcgttaaagtagcagtcctggatacagggatcgaccataatcacccatccttggccaacttcgtgaatactaatcttggccggtcgtttgttggaggaaacaccatggatgttcaaggtcatggcacacatgttgctggcacgattgcatcttatgggagtgtaagcggagtgatgcagagtgcgacactgatcccggtcaaagtgctcgataattctggcagcgggtccctttacggtattacgcaaggcatattgtatgccgccgacatcgatgcggacgtcattaacatgtctctgggtggaggaggctataatcagagcatggatgaggctgttcaaacagcagttgctcagggaaccattgtagtagcagcgactggcaatgatggtgcatcgtcgatcagttatcctgctgcctacagcagcgtcattgcggtgggatctgtgacgtccaatcgtacacgatcctcgttttctaactatggatctgggcttgaagttatggcaccgggcagcaacatctacagtacgtatcctaattccagatatacatctttgagtggtacaagcatggctactccgcacgttgcgggcgtagctgggctcattcgcgcagccaacccagacatatctgtcgcgcaagcccgtcagattctgcgggataccgcgcaagaagcaggatcgttcacacagtacggctatggaatcgtcgatgctcatgccgccgttgttgctgcatccggtggtagcggcggc

SEQ ID NO: 454 - protein, 413 aa, synthetic construct
  REGION 1..413: note = Variant of serine peptidase from Bacillus sinesaloumensis
MADQASQANGNQDVIEGELIVSVEPKNGKPDVSIQSAQSVTGQEDVLKSKGFTIVDTLHVEDSSVKPLVSKNFNKKVVEKMGLVYLVQYSPDQFKSSNIAKKELRKELMDLGFKVRYISENYKMMAIEGTATLQAVHPNQRWHYNMIKAPEAWAITSGSSSVKVAVLDTGIDHNHPSLANFVNTNLGRSFVGGNTMDVQGHGTHVAGTIASYGSVSGVMQSATLIPVKVLDNSGSGSLYGITQGILYAADIDADVINMSLGGGGYNQSMDEAVQTAVAQGTIVVAATGNDGASSISYPAAYSSVIAVGSVTSNRTRSSFSNYGSGLEVMAPGSNIYSTYPNSRYTSLSGTSMATPHVAGVAGLIRAANPDISVAQARQILRDTAQEAGSFTQYGYGIVDAHAAVVAASGGSGG

SEQ ID NO: 455 - DNA, 1239 bp, synthetic construct
  misc_feature 1..1239: note = Variant of serine peptidase from Bacillus sinesaloumensis
  source 1..1239: mol_type = other DNA
atggcagatcaagctagtcaagctaatggaaaccaggacgtcattgaaggcgagctgatcgtttcagtggaaccgaagaacggtaaacctgatgtgagcattcaaagtgcacaatccgtaacagggcaggaagacgtccttaaatcgaaaggctttacgatcgttgataccttgcatgtagaggatagcagcgtcaagccactcgtctcgaagaatttcaataagaaagtggtggagaagatgggactggtgtatcttgttcaatactctccggaccagtttaaaagttccaacattgcgaagaaagaactcagaaaagaattgatggatctgggctttaaagtccgctatataagcgaaaattacaagatgatggcgatcgaaggtacagccactcttcaggcagtacaccctaaccaaaactggcattataatatgattaaagctccggaagcgtgggctattacgtctggatcctctagcgttaaagtagcagtcctggatacagggatcgaccataatcacccatccttggccaacttcgtgaatactaattatggccggtcgtttgttggaggaaacaccatggatgttcaaggtcatggcacacatgttgctggcacgattgcatcttatgggagtgtaagcggagtgatgcagagtgcgacactgatcccggtcaaagtgctcgataattctggcagcgggtccctttacggtattacgcaaggcatattgtatgccgccgacatcgatgcggacgtcattaacatgtctctgggtggaggaggctataatcagagcatggatgaggctgttcaaacagcagttgctcagggaaccattgtagtagcagcgactggcaatgatggtgcatcgtcgatcagttatcctgctgcctacagcagcgtcattgcggtgggatctgtgacgtccaatcgtacacgatcctcgttttctaactatggatctgggcttgaagttatggcaccgggcagcaacatctacagtacgtatcctaattccagatatacatctttgagtggtacaagcatggctactccgcacgttgcgggcgtagctgggctcattcgcgcagccaacccagacatatctgtcgcgcaagcccgtcagattctgcgggataccgcgcaagaagcaggatcgttcacacagtacggctatggaatcgtcgatgctcatgccgccgttgttgctgcatccggtggtagcggcggc

SEQ ID NO: 456 - protein, 413 aa, synthetic construct
  REGION 1..413: note = Variant of serine peptidase from Bacillus sinesaloumensis
MADQASQANGNQDVIEGELIVSVEPKNGKPDVSIQSAQSVTGQEDVLKSKGFTIVDTLHVEDSSVKPLVSKNFNKKVVEKMGLVYLVQYSPDQFKSSNIAKKELRKELMDLGFKVRYISENYKMMAIEGTATLQAVHPNQNWHYNMIKAPEAWAITSGSSSVKVAVLDTGIDHNHPSLANFVNTNYGRSFVGGNTMDVQGHGTHVAGTIASYGSVSGVMQSATLIPVKVLDNSGSGSLYGITQGILYAADIDADVINMSLGGGGYNQSMDEAVQTAVAQGTIVVAATGNDGASSISYPAAYSSVIAVGSVTSNRTRSSFSNYGSGLEVMAPGSNIYSTYPNSRYTSLSGTSMATPHVAGVAGLIRAANPDISVAQARQILRDTAQEAGSFTQYGYGIVDAHAAVVAASGGSGG

SEQ ID NO: 457 - DNA, 1239 bp, synthetic construct
  misc_feature 1..1239: note = Variant of serine peptidase from Bacillus sinesaloumensis
  source 1..1239: mol_type = other DNA
atggcagatcaagctagtcaagctaatggaaaccaggacgtcattgaaggcgagctgatcgtttcagtggaaccgaagaacggtaaacctgatgtgagcattcaaagtgcacaatccgtaacagggcaggaagacgtccttaaatcgaaaggctttacgatcgttgataccttgcatgtagaggatagcagcgtcaagccactcgtctcgaagaatttcaataagaaagtggtggagaagatgggactggtgtatcttgttcaatactctccggaccagtttaaaagttccaacattgcgaagaaagaactcagaaaagaattgatggatctgggctttaaagtccgctatataagcgaaaattacaagatgatggcgatcgaaggtacagccactcttcaggcagtacaccctaaccaaaactggcattataatatgattaaagctccggaagcgtgggctattacgtctggatcctctagcgttaaagtagcagtcctggatacagggatcgaccataatcacccatccttggccaacttcgtgaatactaatcttggccggtcgtttgttggaggaaacaccatggatgttcaaggtcatggcacacatgttgctggcacgattgcatcttatgggagtgtaagcggagtgatgcagagtgcgacactgatcccggtcaaagtgctcgataattctggcagcgggtccctttacggtattacgcaaggcatattgtatgccgccgacatcgatgcggacgtcattaacatgtctctgggtggaggaggctataatcagagcatggatgaggctgttcaaacagcagttgctcagggaaccattgtagtagcagcgactggcaatgatggtgcatcgtcgatcagttatcctgctgcctacagcagcgtcattgcggtgggatctgtgacgcgtaatcgtacacgatcctcgttttctaactatggatctgggcttgaagttatggcaccgggcagcaacatctacagtacgtatcctaattccagatatacatctttgagtggtacaagcatggctactccgcacgttgcgggcgtagctgggctcattcgcgcagccaacccagacatatctgtcgcgcaagcccgtcagattctgcgggataccgcgcaagaagcaggatcgttcacacagtacggctatggaatcgtcgatgctcatgccgccgttgttgctgcatccggtggtagcggcggc

SEQ ID NO: 458 - protein, 413 aa, synthetic construct
  REGION 1..413: note = Variant of serine peptidase from Bacillus sinesaloumensis
MADQASQANGNQDVIEGELIVSVEPKNGKPDVSIQSAQSVTGQEDVLKSKGFTIVDTLHVEDSSVKPLVSKNFNKKVVEKMGLVYLVQYSPDQFKSSNIAKKELRKELMDLGFKVRYISENYKMMAIEGTATLQAVHPNQNWHYNMIKAPEAWAITSGSSSVKVAVLDTGIDHNHPSLANFVNTNLGRSFVGGNTMDVQGHGTHVAGTIASYGSVSGVMQSATLIPVKVLDNSGSGSLYGITQGILYAADIDADVINMSLGGGGYNQSMDEAVQTAVAQGTIVVAATGNDGASSISYPAAYSSVIAVGSVTRNRTRSSFSNYGSGLEVMAPGSNIYSTYPNSRYTSLSGTSMATPHVAGVAGLIRAANPDISVAQARQILRDTAQEAGSFTQYGYGIVDAHAAVVAASGGSGG

SEQ ID NO: 459 - DNA, 1239 bp, synthetic construct
  misc_feature 1..1239: note = Variant of serine peptidase from Bacillus sinesaloumensis
  source 1..1239: mol_type = other DNA
atggcagatcaagctagtcaagctaatggaaaccaggacgtcattgaaggcgagctgatcgtttcagtggaaccgaagaacggtaaacctgatgtgagcattcaaagtgcacaatccgtaacagggcaggaagacgtccttaaatcgaaaggctttacgatcgttgataccttgcatgtagaggatagcagcgtcaagccactcgtctcgaagaatttcaataagaaagtggtggagaagatgggactggtgtatcttgttcaatactctccggaccagtttaaaagttccaacattgcgaagaaagaactcagaaaagaattgatggatctgggctttaaagtccgctatataagcgaaaattacaagatgatggcgatcgaaggtacagccactcttcaggcagtacaccctaaccaaaactggcattataatatgattaaagctccggaagcgtgggctattacgtctggatcctctagcgttaaagtagcagtcctggatacagggatcgaccataatcacccatccttggccaacttcgtgaatactaatcttggccggtcgtttgttggaggaaacaccatggatgttcaaggtcatggcacacatgttgctggcacgattgcatcttatgggagtgtaagcggagtgatgcagagtgcgacactgatcccggtcaaagtgctcgataattctggcagcgggtccctttacggtattacgcaaggcatattgtatgccgccgacatcgatgcggacgtcattaacatgtctctgggtggaggaggctataatcagagcatggatgaggctgttcaaacagcagttgctcagggaaccattgtagtagcagcgactggcaatgatggtgcatcgtcgatcagttatcctgctgcctacagcagcgtcattgcggtgggatctgtgacgtcccagcgtacacgatcctcgttttctaactatggatctgggcttgaagttatggcaccgggcagcaacatctacagtacgtatcctaattccagatatacatctttgagtggtacaagcatggctactccgcacgttgcgggcgtagctgggctcattcgcgcagccaacccagacatatctgtcgcgcaagcccgtcagattctgcgggataccgcgcaagaagcaggatcgttcacacagtacggctatggaatcgtcgatgctcatgccgccgttgttgctgcatccggtggtagcggcggc

SEQ ID NO: 460 - protein, 413 aa, synthetic construct
  REGION 1..413: note = Variant of serine peptidase from Bacillus sinesaloumensis
MADQASQANGNQDVIEGELIVSVEPKNGKPDVSIQSAQSVTGQEDVLKSKGFTIVDTLHVEDSSVKPLVSKNFNKKVVEKMGLVYLVQYSPDQFKSSNIAKKELRKELMDLGFKVRYISENYKMMAIEGTATLQAVHPNQNWHYNMIKAPEAWAITSGSSSVKVAVLDTGIDHNHPSLANFVNTNLGRSFVGGNTMDVQGHGTHVAGTIASYGSVSGVMQSATLIPVKVLDNSGSGSLYGITQGILYAADIDADVINMSLGGGGYNQSMDEAVQTAVAQGTIVVAATGNDGASSISYPAAYSSVIAVGSVTSQRTRSSFSNYGSGLEVMAPGSNIYSTYPNSRYTSLSGTSMATPHVAGVAGLIRAANPDISVAQARQILRDTAQEAGSFTQYGYGIVDAHAAVVAASGGSGG

SEQ ID NO: 461 - DNA, 1239 bp, synthetic construct
  misc_feature 1..1239: note = Variant of serine peptidase from Bacillus sinesaloumensis
  source 1..1239: mol_type = other DNA
atggcagatcaagctagtcaagctaatggaaaccaggacgtcattgaaggcgagctgatcgtttcagtggaaccgaagaacggtaaacctgatgtgagcattcaaagtgcacaatccgtaacagggcaggaagacgtccttaaatcgaaaggctttacgatcgttgataccttgcatgtagaggatagcagcgtcaagccactcgtctcgaagaatttcaataagaaagtggtggagaagatgggactggtgtatcttgttcaatactctccggaccagtttaaaagttccaacattgcgaagaaagaactcagaaaagaattgatggatctgggctttaaagtccgctatataagcgaaaattacaagatgatggcgatcgaaggtacagccactcttcaggcagtacaccctaaccaaaactggcattataatatgattaaagctccggaagcgtgggctattacgtctggatcctctagcgttaaagtagcagtcctggatacagggatcgaccataatcacccatccttggccaacttcgtgaatactaatcttggccggtcgtttgttggaggaaacaccatggatgttcaaggtcatggcacacatgttgctggcacgattgcatcttatgggagtgtaagcggagtgatgcagagtgcgacactgatcccggtcaaagtgctcgataattctggcagcgggtccctttacggtattacgcaaggcatattgtatgccgccgacatcgatgcggacgtcattaacatgtctctgggtggaggaggctataatcagagcatggatgaggctgttcaaacagcagttgctcagggaaccattgtagtagcagcgactggcaatgatggtgcatcgtcgatcagttatcctgctgcctacagcagcgtcattgcggtgggatctgtgacgtccaatcgtgttcgatcctcgttttctaactatggatctgggcttgaagttatggcaccgggcagcaacatctacagtacgtatcctaattccagatatacatctttgagtggtacaagcatggctactccgcacgttgcgggcgtagctgggctcattcgcgcagccaacccagacatatctgtcgcgcaagcccgtcagattctgcgggataccgcgcaagaagcaggatcgttcacacagtacggctatggaatcgtcgatgctcatgccgccgttgttgctgcatccggtggtagcggcggc

SEQ ID NO: 462 - protein, 413 aa, synthetic construct
  REGION 1..413: note = Variant of serine peptidase from Bacillus sinesaloumensis
MADQASQANGNQDVIEGELIVSVEPKNGKPDVSIQSAQSVTGQEDVLKSKGFTIVDTLHVEDSSVKPLVSKNFNKKVVEKMGLVYLVQYSPDQFKSSNIAKKELRKELMDLGFKVRYISENYKMMAIEGTATLQAVHPNQNWHYNMIKAPEAWAITSGSSSVKVAVLDTGIDHNHPSLANFVNTNLGRSFVGGNTMDVQGHGTHVAGTIASYGSVSGVMQSATLIPVKVLDNSGSGSLYGITQGILYAADIDADVINMSLGGGGYNQSMDEAVQTAVAQGTIVVAATGNDGASSISYPAAYSSVIAVGSVTSNRVRSSFSNYGSGLEVMAPGSNIYSTYPNSRYTSLSGTSMATPHVAGVAGLIRAANPDISVAQARQILRDTAQEAGSFTQYGYGIVDAHAAVVAASGGSGG

SEQ ID NO: 463 - DNA, 1239 bp, synthetic construct
  misc_feature 1..1239: note = Variant of serine peptidase from Bacillus sinesaloumensis
  source 1..1239: mol_type = other DNA
atggcagatcaagctagtcaagctaatggaaaccaggacgtcattgaaggcgagctgatcgtttcagtggaaccgaagaacggtaaacctgatgtgagcattcaaagtgcacaatccgtaacagggcaggaagacgtccttaaatcgaaaggctttacgatcgttgataccttgcatgtagaggatagcagcgtcaagccactcgtctcgaagaatttcaataagaaagtggtggagaagatgggactggtgtatcttgttcaatactctccggaccagtttaaaagttccaacattgcgaagaaagaactcagaaaagaattgatggatctgggctttaaagtccgctatataagcgaaaattacaagatgatggcgatcgaaggtacagccactcttcaggcagtacaccctaaccaaaactggcattataatatgattaaagctccggaagcgtgggctattacgtctggatcctctagcgttaaagtagcagtcctggatacagggatcgaccataatcacccatccttggccaacttcgtgaatactaatcttggccggtcgtttgttggaggaaacaccatggatgttcaaggtcatggcacacatgttgctggcacgattgcatcttatgggagtgtaagcggagtgatgcagagtgcgacactgatcccggtcaaagtgctcgataattctggcagcgggtccctttacggtattacgcaaggcatattgtatgccgccgacatcgatgcggacgtcattaacatgtctctgggtggaggaggctataatcagagcatggatgaggctgttcaaacagcagttgctcagggaaccattgtagtagcagcgactggcaatgatggtgcatcgtcgatcagttatcctgctgcctacagcagcgtcattgcggtgggatctgtgacgtccaatcgtacacgatcctcgttttctaactatggatctgggcttgaagttatggcaccgggcagcaacatctacagtacgtatcctaattccagatatacatctttgagtggtacaagcatggctactccgcacgttgcgggcgtagctgggctcattcgcgcagccaacccagacatatctgtcgggcaagcccgtcagattctgcgggataccgcgcaagaagcaggatcgttcacacagtacggctatggaatcgtcgatgctcatgccgccgttgttgctgcatccggtggtagcggcggc

SEQ ID NO: 464 - protein, 413 aa, synthetic construct
  REGION 1..413: note = Variant of serine peptidase from Bacillus sinesaloumensis
MADQASQANGNQDVIEGELIVSVEPKNGKPDVSIQSAQSVTGQEDVLKSKGFTIVDTLHVEDSSVKPLVSKNFNKKVVEKMGLVYLVQYSPDQFKSSNIAKKELRKELMDLGFKVRYISENYKMMAIEGTATLQAVHPNQNWHYNMIKAPEAWAITSGSSSVKVAVLDTGIDHNHPSLANFVNTNLGRSFVGGNTMDVQGHGTHVAGTIASYGSVSGVMQSATLIPVKVLDNSGSGSLYGITQGILYAADIDADVINMSLGGGGYNQSMDEAVQTAVAQGTIVVAATGNDGASSISYPAAYSSVIAVGSVTSNRTRSSFSNYGSGLEVMAPGSNIYSTYPNSRYTSLSGTSMATPHVAGVAGLIRAANPDISVGQARQILRDTAQEAGSFTQYGYGIVDAHAAVVAASGGSGG

SEQ ID NO: 465 - DNA, 1239 bp, synthetic construct
  misc_feature 1..1239: note = Variant of serine peptidase from Bacillus sinesaloumensis
  source 1..1239: mol_type = other DNA
atggcagatcaagctagtcaagctaatggaaaccaggacgtcattgaaggcgagctgatcgtttcagtggaaccgaagaacggtaaacctgatgtgagcattcaaagtgcacaatccgtaacagggcaggaagacgtccttaaatcgaaaggctttacgatcgttgataccttgcatgtagaggatagcagcgtcaagccactcgtctcgaagaatttcaataagaaagtggtggagaagatgggactggtgtatcttgttcaatactctccggaccagtttaaaagttccaacattgcgaagaaagaactcagaaaagaattgatggatctgggctttaaagtccgctatataagcgaaaattacaagatgatggcgatctcgggtacagccactcttcaggcagtacaccctaaccaaaactggcattataatatgattaaagctccggaagcgtgggctattacgtctggatcctctagcgttaaagtagcagtcctggatacagggatcgaccataatcacccatccttggccaacttcgtgaatactaatcttggccggtcgtttgttggaggaaacaccatggatgttcaaggtcatggcacacatgttgctggcacgattgcatcttatgggagtgtaagcggagtgatgcagagtgcgacactgatcccggtcaaagtgctcgataattctggcagcgggtccctttacggtattacgcaaggcatattgtatgccgccgacatcgatgcggacgtcattaacatgtctctgggtggaggaggctataatcagagcatggatgaggctgttcaaacagcagttgctcagggaaccattgtagtagcagcgactggcaatgatggtgcatcgtcgatcagttatcctgctgcctacagcagcgtcattgcggtgggatctgtgacgtccaatcgtacacgatcctcgttttctaactatggatctgggcttgaagttatggcaccgggcagcaacatctacagtacgtatcctaattccagatatacatctttgagtggtacaagcatggctactccgcacgttgcgggcgtagctgggctcattcgcgcagccaacccagacatatctgtcgcgcaagcccgtcagattctgcgggataccgcgcaagaagcaggatcgttcacacagtacggctatggaatcgtcgatgctcatgccgccgttgttgctgcatccggtggtagcggcggc

SEQ ID NO: 466 - protein, 413 aa, synthetic construct
  REGION 1..413: note = Variant of serine peptidase from Bacillus sinesaloumensis
MADQASQANGNQDVIEGELIVSVEPKNGKPDVSIQSAQSVTGQEDVLKSKGFTIVDTLHVEDSSVKPLVSKNFNKKVVEKMGLVYLVQYSPDQFKSSNIAKKELRKELMDLGFKVRYISENYKMMAISGTATLQAVHPNQNWHYNMIKAPEAWAITSGSSSVKVAVLDTGIDHNHPSLANFVNTNLGRSFVGGNTMDVQGHGTHVAGTIASYGSVSGVMQSATLIPVKVLDNSGSGSLYGITQGILYAADIDADVINMSLGGGGYNQSMDEAVQTAVAQGTIVVAATGNDGASSISYPAAYSSVIAVGSVTSNRTRSSFSNYGSGLEVMAPGSNIYSTYPNSRYTSLSGTSMATPHVAGVAGLIRAANPDISVAQARQILRDTAQEAGSFTQYGYGIVDAHAAVVAASGGSGG

SEQ ID NO: 467 - DNA, 1239 bp, synthetic construct
  misc_feature 1..1239: note = Variant of serine peptidase from Bacillus sinesaloumensis
  source 1..1239: mol_type = other DNA
atggcagatcaagctagtcaagctaatggaaaccaggacgtcattgaaggcgagctgatcgtttcagtggaaccgaagaacggtaaacctgatgtgagcattcaaagtgcacaatccgtaacagggcaggaagacgtccttaaatcgaaaggctttacgatcgttgataccttgcatgtagaggatagcagcgtcaagccactcgtctcgaagaatttcaataagaaagtggtggagaagatgggactggtgtatcttgttcaatactctccggaccagtttaaaagttccaacattgcgaagaaagaactcagaaaagaattgatggatctgggctttaaagtccgctatataagcgaaaattacaagatgatggcgatcgaaggtacagccactcttcaggcagctcaccctaaccaaaactggcattataatatgattaaagctccggaagcgtgggctattacgtctggatcctctagcgttaaagtagcagtcctggatacagggatcgaccataatcacccatccttggccaacttcgtgaatactaatcttggccggtcgtttgttggaggaaacaccatggatgttcaaggtcatggcacacatgttgctggcacgattgcatcttatgggagtgtaagcggagtgatgcagagtgcgacactgatcccggtcaaagtgctcgataattctggcagcgggtccctttacggtattacgcaaggcatattgtatgccgccgacatcgatgcggacgtcattaacatgtctctgggtggaggaggctataatcagagcatggatgaggctgttcaaacagcagttgctcagggaaccattgtagtagcagcgactggcaatgatggtgcatcgtcgatcagttatcctgctgcctacagcagcgtcattgcggtgggatctgtgacgtccaatcgtacacgatcctcgttttctaactatggatctgggcttgaagttatggcaccgggcagcaacatctacagtacgtatcctaattccagatatacatctttgagtggtacaagcatggctactccgcacgttgcgggcgtagctgggctcattcgcgcagccaacccagacatatctgtcgcgcaagcccgtcagattctgcgggataccgcgcaagaagcaggatcgttcacacagtacggctatggaatcgtcgatgctcatgccgccgttgttgctgcatccggtggtagcggcggc

SEQ ID NO: 468 - protein, 413 aa, synthetic construct
  REGION 1..413: note = Variant of serine peptidase from Bacillus sinesaloumensis
MADQASQANGNQDVIEGELIVSVEPKNGKPDVSIQSAQSVTGQEDVLKSKGFTIVDTLHVEDSSVKPLVSKNFNKKVVEKMGLVYLVQYSPDQFKSSNIAKKELRKELMDLGFKVRYISENYKMMAIEGTATLQAAHPNQNWHYNMIKAPEAWAITSGSSSVKVAVLDTGIDHNHPSLANFVNTNLGRSFVGGNTMDVQGHGTHVAGTIASYGSVSGVMQSATLIPVKVLDNSGSGSLYGITQGILYAADIDADVINMSLGGGGYNQSMDEAVQTAVAQGTIVVAATGNDGASSISYPAAYSSVIAVGSVTSNRTRSSFSNYGSGLEVMAPGSNIYSTYPNSRYTSLSGTSMATPHVAGVAGLIRAANPDISVAQARQILRDTAQEAGSFTQYGYGIVDAHAAVVAASGGSGG

SEQ ID NO: 469 - DNA, 1239 bp, synthetic construct
  misc_feature 1..1239: note = Variant of serine peptidase from Bacillus sinesaloumensis
  source 1..1239: mol_type = other DNA
atggcagatcaagctagtcaagctaatggaaaccaggacgtcattgaaggcgagctgatcgtttcagtggaaccgaagaacggtaaacctgatgtgagcattcaaagtgcacaatccgtaacagggcaggaagacgtccttaaatcgaaaggctttacgatcgttgataccttgcatgtagaggatagcagcgtcaagccactcgtctcgaagaatttcaataagaaagtggtggagaagatgggactggtgtatcttgttcaatactctccggaccagtttaaaagttccaacattgcgaagaaagaactcagaaaagaattgatggatctgggctttaaagtccgctatataagcgaaaattacaagatgatggcgatccgtggtacagccactcttcaggcagtacaccctaaccaaaactggcattataatatgattaaagctccggaagcgtgggctattacgtctggatcctctagcgttaaagtagcagtcctggatacagggatcgaccataatcacccatccttggccaacttcgtgaatactaatcttggccggtcgtttgttggaggaaacaccatggatgttcaaggtcatggcacacatgttgctggcacgattgcatcttatgggagtgtaagcggagtgatgcagagtgcgacactgatcccggtcaaagtgctcgataattctggcagcgggtccctttacggtattacgcaaggcatattgtatgccgccgacatcgatgcggacgtcattaacatgtctctgggtggaggaggctataatcagagcatggatgaggctgttcaaacagcagttgctcagggaaccattgtagtagcagcgactggcaatgatggtgcatcgtcgatcagttatcctgctgcctacagcagcgtcattgcggtgggatctgtgacgtccaatcgtacacgatcctcgttttctaactatggatctgggcttgaagttatggcaccgggcagcaacatctacagtacgtatcctaattccagatatacatctttgagtggtacaagcatggctactccgcacgttgcgggcgtagctgggctcattcgcgcagccaacccagacatatctgtcgcgcaagcccgtcagattctgcgggataccgcgcaagaagcaggatcgttcacacagtacggctatggaatcgtcgatgctcatgccgccgttgttgctgcatccggtggtagcggcggc

SEQ ID NO: 470 - protein, 413 aa, synthetic construct
  REGION 1..413: note = Variant of serine peptidase from Bacillus sinesaloumensis
MADQASQANGNQDVIEGELIVSVEPKNGKPDVSIQSAQSVTGQEDVLKSKGFTIVDTLHVEDSSVKPLVSKNFNKKVVEKMGLVYLVQYSPDQFKSSNIAKKELRKELMDLGFKVRYISENYKMMAIRGTATLQAVHPNQNWHYNMIKAPEAWAITSGSSSVKVAVLDTGIDHNHPSLANFVNTNLGRSFVGGNTMDVQGHGTHVAGTIASYGSVSGVMQSATLIPVKVLDNSGSGSLYGITQGILYAADIDADVINMSLGGGGYNQSMDEAVQTAVAQGTIVVAATGNDGASSISYPAAYSSVIAVGSVTSNRTRSSFSNYGSGLEVMAPGSNIYSTYPNSRYTSLSGTSMATPHVAGVAGLIRAANPDISVAQARQILRDTAQEAGSFTQYGYGIVDAHAAVVAASGGSGG

SEQ ID NO: 471 - DNA, 1239 bp, synthetic construct
  misc_feature 1..1239: note = Variant of serine peptidase from Bacillus sinesaloumensis
  source 1..1239: mol_type = other DNA
atggcagatcaagctagtcaagctaatggaaaccaggacgtcattgaaggcgagctgatcgtttcagtggaaccgaagaacggtaaacctgatgtgagcattcaaagtgcacaatccgtaacagggcaggaagacgtccttaaatcgaaaggctttacgatcgttgataccttgcatgtagaggatagcagcgtcaagccactcgtctcgaagaatttcaataagaaagtggtggagaagatgggactggtgtatcttgttcaatactctccggaccagtttaaaagttccaacattgcgaagaaagaactcagaaaagaattgatggatctgggctttaaagtccgctatataagcgaaaattacaagatgatggcgatcgaaggtacagccactcttcaggcagtacaccctaaccaaaactggcattataatatgattaaagctccggaagcgtgggctattacgtctggatcctctagcgttaaagtagcagtcctggatacagggatcgaccataatcacccatccttggccaacttcgtgaatactaatcttggccggtcgtttgttggaggaaacaccatggatgttcaaggtcatggcacacatgttgctggcacgattgcatcttatgggagtgtaagcggagtgatgcagagtgcgacactgatcccggtcaaagtgctcgataattctggcagcgggtccctttacggtattacgcaaggcatattgtatgccgccgacatcgatgcggacgtcattaacatgtctctgggtggaggaggctataatcagagcatggatgaggctgttcaaacagcagttgctcagggaaccattgtagtagcagcgactggcaatgatggtgcatcgtcgatcagttatcctgctgcctacagcagcgtcattgcggtgggatctgtgacgtccaatcgtacacgatcctcgttttctaactatggatctgggcttgaagttatggcaccgggcagcaacatctacagtacgtatcctaattccagatatacatctttgagtggtacaagcatggctactccgcacgttgcgggcgtagctgggctcattcgcgcagccaacccacagatatctgtcgcgcaagcccgtcagattctgcgggataccgcgcaagaagcaggatcgttcacacagtacggctatggaatcgtcgatgctcatgccgccgttgttgctgcatccggtggtagcggcggc

SEQ ID NO: 472 - protein, 413 aa, synthetic construct
  REGION 1..413: note = Variant of serine peptidase from Bacillus sinesaloumensis
MADQASQANGNQDVIEGELIVSVEPKNGKPDVSIQSAQSVTGQEDVLKSKGFTIVDTLHVEDSSVKPLVSKNFNKKVVEKMGLVYLVQYSPDQFKSSNIAKKELRKELMDLGFKVRYISENYKMMAIEGTATLQAVHPNQNWHYNMIKAPEAWAITSGSSSVKVAVLDTGIDHNHPSLANFVNTNLGRSFVGGNTMDVQGHGTHVAGTIASYGSVSGVMQSATLIPVKVLDNSGSGSLYGITQGILYAADIDADVINMSLGGGGYNQSMDEAVQTAVAQGTIVVAATGNDGASSISYPAAYSSVIAVGSVTSNRTRSSFSNYGSGLEVMAPGSNIYSTYPNSRYTSLSGTSMATPHVAGVAGLIRAANPQISVAQARQILRDTAQEAGSFTQYGYGIVDAHAAVVAASGGSGG

SEQ ID NO: 473 - DNA, 1239 bp, synthetic construct
  misc_feature 1..1239: note = Variant of serine peptidase from Bacillus sinesaloumensis
  source 1..1239: mol_type = other DNA
atggcagatcaagctagtcaagctaatggaaaccaggacgtcattgaaggcgagctgatcgtttcagtggaaccgaagaacggtaaacctgatgtgagcattcaaagtgcacaatccgtaacagggcaggaagacgtccttaaatcgaaaggctttacgatcgttgataccttgcatgtagaggatagcagcgtcaagccactcgtctcgaagaatttcaataagaaagtggtggagaagatgggactggtgtatcttgttcaatactctccggaccagtttaaaagttccaacattgcgaagaaagaactcagaaaagaattgatggatctgggctttaaagtccgctatataagcgaaaattacaagatgatggcgatcgaaggtacagccactcttcaggcagtacaccctaaccaaaactggcattataatatgattaaagctccggaagcgtgggctattacgtctggatcctctagcgttaaagtagcagtcctggatacagggatcgaccataatcacccatccttggccaacttcgtgaatactaatcttggccggtcgtttgttggaggaaacaccatggatgttcaaggtcatggcacacatgttgctggcacgattgcatcttatgggagtgtaagcggagtgatgcagagtgcgacactgatcccggtcaaagtgctcgataattctggcagcgggtccctttacggtattacgcaaggcatattgtatgccgccgacatcgatgcggacgtcattaacatgtctctgggtggaggaggctataatgtgagcatggatgaggctgttcaaacagcagttgctcagggaaccattgtagtagcagcgactggcaatgatggtgcatcgtcgatcagttatcctgctgcctacagcagcgtcattgcggtgggatctgtgacgtccaatcgtacacgatcctcgttttctaactatggatctgggcttgaagttatggcaccgggcagcaacatctacagtacgtatcctaattccagatatacatctttgagtggtacaagcatggctactccgcacgttgcgggcgtagctgggctcattcgcgcagccaacccagacatatctgtcgcgcaagcccgtcagattctgcgggataccgcgcaagaagcaggatcgttcacacagtacggctatggaatcgtcgatgctcatgccgccgttgttgctgcatccggtggtagcggcggc

SEQ ID NO: 474 - protein, 413 aa, synthetic construct
  REGION 1..413: note = Variant of serine peptidase from Bacillus sinesaloumensis
MADQASQANGNQDVIEGELIVSVEPKNGKPDVSIQSAQSVTGQEDVLKSKGFTIVDTLHVEDSSVKPLVSKNFNKKVVEKMGLVYLVQYSPDQFKSSNIAKKELRKELMDLGFKVRYISENYKMMAIEGTATLQAVHPNQNWHYNMIKAPEAWAITSGSSSVKVAVLDTGIDHNHPSLANFVNTNLGRSFVGGNTMDVQGHGTHVAGTIASYGSVSGVMQSATLIPVKVLDNSGSGSLYGITQGILYAADIDADVINMSLGGGGYNVSMDEAVQTAVAQGTIVVAATGNDGASSISYPAAYSSVIAVGSVTSNRTRSSFSNYGSGLEVMAPGSNIYSTYPNSRYTSLSGTSMATPHVAGVAGLIRAANPDISVAQARQILRDTAQEAGSFTQYGYGIVDAHAAVVAASGGSGG

SEQ ID NO: 475 - DNA, 1239 bp, synthetic construct
  misc_feature 1..1239: note = Variant of serine peptidase from Bacillus sinesaloumensis
  source 1..1239: mol_type = other DNA
atggcagatcaagctagtcaagctaatggaaaccaggacgtcattgaaggcgagctgatcgtttcagtggaaccgaagaacggtaaacctgatgtgagcattcaaagtgcacaatccgtaacagggcaggaagacgtccttaaatcgaaaggctttacgatcgttgataccttgcatgtagaggatagcagcgtcaagccactcgtctcgaagaatttcaataagaaagtggtggagaagatgggactggtgtatcttgttcaatactctccggaccagtttaaaagttccaacattgcgaagaaagaactcagaaaagaattgatggatctgggctttaaagtccgctatataagcgaaaattacaagatgatggcgatcgaaggtacagccactcttcaggcagtacaccctaaccaaaactggcattataatatgattaaagctccggaagcgtgggctattacgtctggatcctctagcgttaaagtagcagtcctggatacagggatcgaccataatcacccatccttggccaacttcgtgaatactaatcttggcatgtcgtttgttggaggaaacaccatggatgttcaaggtcatggcacacatgttgctggcacgattgcatcttatgggagtgtaagcggagtgatgcagagtgcgacactgatcccggtcaaagtgctcgataattctggcagcgggtccctttacggtattacgcaaggcatattgtatgccgccgacatcgatgcggacgtcattaacatgtctctgggtggaggaggctataatcagagcatggatgaggctgttcaaacagcagttgctcagggaaccattgtagtagcagcgactggcaatgatggtgcatcgtcgatcagttatcctgctgcctacagcagcgtcattgcggtgggatctgtgacgtccaatcgtacacgatcctcgttttctaactatggatctgggcttgaagttatggcaccgggcagcaacatctacagtacgtatcctaattccagatatacatctttgagtggtacaagcatggctactccgcacgttgcgggcgtagctgggctcattcgcgcagccaacccagacatatctgtcgcgcaagcccgtcagattctgcgggataccgcgcaagaagcaggatcgttcacacagtacggctatggaatcgtcgatgctcatgccgccgttgttgctgcatccggtggtagcggcggc

SEQ ID NO: 476 - protein, 413 aa, synthetic construct
  REGION 1..413: note = Variant of serine peptidase from Bacillus sinesaloumensis
MADQASQANGNQDVIEGELIVSVEPKNGKPDVSIQSAQSVTGQEDVLKSKGFTIVDTLHVEDSSVKPLVSKNFNKKVVEKMGLVYLVQYSPDQFKSSNIAKKELRKELMDLGFKVRYISENYKMMAIEGTATLQAVHPNQNWHYNMIKAPEAWAITSGSSSVKVAVLDTGIDHNHPSLANFVNTNLGMSFVGGNTMDVQGHGTHVAGTIASYGSVSGVMQSATLIPVKVLDNSGSGSLYGITQGILYAADIDADVINMSLGGGGYNQSMDEAVQTAVAQGTIVVAATGNDGASSISYPAAYSSVIAVGSVTSNRTRSSFSNYGSGLEVMAPGSNIYSTYPNSRYTSLSGTSMATPHVAGVAGLIRAANPDISVAQARQILRDTAQEAGSFTQYGYGIVDAHAAVVAASGGSGG

SEQ ID NO: 477 - DNA, 1239 bp, synthetic construct
  misc_feature 1..1239: note = Variant of serine peptidase from Bacillus sinesaloumensis
  source 1..1239: mol_type = other DNA
atggcagatcaagctagtcaagctaatggaaaccaggacgtcattgaaggcgagctgatcgtttcagtggaaccgaagaacggtaaacctgatgtgagcattcaaagtgcacaatccgtaacagggcaggaagacgtccttaaatcgaaaggctttacgatcgttgataccttgcatgtagaggatagcagcgtcaagccactcgtctcgaagaatttcaataagaaagtggtggagaagatgggactggtgtatcttgttcaatactctccggaccagtttaaaagttccaacattgcgaagaaagaactcagaaaagaattgatggatctgggctttaaagtccgctatataagcgaaaattacaagatgatggcgatcgaaggtacagccactcttcaggcagtacaccctaaccaaaactggcattataatatgattaaagctccggaagcgtgggctattacgtctggatcctctagcgttaaagtagcagtcctggatacagggatcgaccataatcacccatccttggccaacttcgtgaatactaatcttggcttttcgtttgttggaggaaacaccatggatgttcaaggtcatggcacacatgttgctggcacgattgcatcttatgggagtgtaagcggagtgatgcagagtgcgacactgatcccggtcaaagtgctcgataattctggcagcgggtccctttacggtattacgcaaggcatattgtatgccgccgacatcgatgcggacgtcattaacatgtctctgggtggaggaggctataatcagagcatggatgaggctgttcaaacagcagttgctcagggaaccattgtagtagcagcgactggcaatgatggtgcatcgtcgatcagttatcctgctgcctacagcagcgtcattgcggtgggatctgtgacgtccaatcgtacacgatcctcgttttctaactatggatctgggcttgaagttatggcaccgggcagcaacatctacagtacgtatcctaattccagatatacatctttgagtggtacaagcatggctactccgcacgttgcgggcgtagctgggctcattcgcgcagccaacccagacatatctgtcgcgcaagcccgtcagattctgcgggataccgcgcaagaagcaggatcgttcacacagtacggctatggaatcgtcgatgctcatgccgccgttgttgctgcatccggtggtagcggcggc

SEQ ID NO: 478 - protein, 413 aa, synthetic construct
  REGION 1..413: note = Variant of serine peptidase from Bacillus sinesaloumensis
MADQASQANGNQDVIEGELIVSVEPKNGKPDVSIQSAQSVTGQEDVLKSKGFTIVDTLHVEDSSVKPLVSKNFNKKVVEKMGLVYLVQYSPDQFKSSNIAKKELRKELMDLGFKVRYISENYKMMAIEGTATLQAVHPNQNWHYNMIKAPEAWAITSGSSSVKVAVLDTGIDHNHPSLANFVNTNLGFSFVGGNTMDVQGHGTHVAGTIASYGSVSGVMQSATLIPVKVLDNSGSGSLYGITQGILYAADIDADVINMSLGGGGYNQSMDEAVQTAVAQGTIVVAATGNDGASSISYPAAYSSVIAVGSVTSNRTRSSFSNYGSGLEVMAPGSNIYSTYPNSRYTSLSGTSMATPHVAGVAGLIRAANPDISVAQARQILRDTAQEAGSFTQYGYGIVDAHAAVVAASGGSGG

SEQ ID NO: 479 - DNA, 1239 bp, synthetic construct
  misc_feature 1..1239: note = Variant of serine peptidase from Bacillus sinesaloumensis
  source 1..1239: mol_type = other DNA
atggcagatcaagctagtcaagctaatggaaaccaggacgtcattgaaggcgagctgatcgtttcagtggaaccgaagaacggtaaacctgatgtgagcattcaaagtgcacaatccgtaacagggcaggaagacgtccttaaatcgaaaggctttacgatcgttgataccttgcatgtagaggatagcagcgtcaagccactcgtctcgaagaatttcaataagaaagtggtggagaagatgggactggtgtatcttgttcaatactctccggaccagtttaaaagttccaacattgcgaagaaagaactcagaaaagaattgatggatctgggctttaaagtccgctatataagcgaaaattacaagatgatggcgatcgaaggtacagccactcttcaggcagtacaccctaaccaaaactggcattataatatgattaaagctccggaagcgtgggctattacgtctggatcctctagcgttaaagtagcagtcctggatacagggatcgaccataatcacccatccttggccaacttcgtgaatactaatcttggccggtcgtttgttggaggaaacaccatggatgttcaaggtcatggcacacatgttgctggcacgattgcatcttatgggagtgtaagcggagtgatgcagagtgcgacactgatcccggtcaaagtgctcgataattctggcagcgggtccctttacggtattacgcaaggcatattgtatgccgccgacatcgatgcggacgtcattaacatgtctctgggtggatcgggctataatcagagcatggatgaggctgttcaaacagcagttgctcagggaaccattgtagtagcagcgactggcaatgatggtgcatcgtcgatcagttatcctgctgcctacagcagcgtcattgcggtgggatctgtgacgtccaatcgtacacgatcctcgttttctaactatggatctgggcttgaagttatggcaccgggcagcaacatctacagtacgtatcctaattccagatatacatctttgagtggtacaagcatggctactccgcacgttgcgggcgtagctgggctcattcgcgcagccaacccagacatatctgtcgcgcaagcccgtcagattctgcgggataccgcgcaagaagcaggatcgttcacacagtacggctatggaatcgtcgatgctcatgccgccgttgttgctgcatccggtggtagcggcggc

SEQ ID NO: 480 - protein, 413 aa, synthetic construct
  REGION 1..413: note = Variant of serine peptidase from Bacillus sinesaloumensis
MADQASQANGNQDVIEGELIVSVEPKNGKPDVSIQSAQSVTGQEDVLKSKGFTIVDTLHVEDSSVKPLVSKNFNKKVVEKMGLVYLVQYSPDQFKSSNIAKKELRKELMDLGFKVRYISENYKMMAIEGTATLQAVHPNQNWHYNMIKAPEAWAITSGSSSVKVAVLDTGIDHNHPSLANFVNTNLGRSFVGGNTMDVQGHGTHVAGTIASYGSVSGVMQSATLIPVKVLDNSGSGSLYGITQGILYAADIDADVINMSLGGSGYNQSMDEAVQTAVAQGTIVVAATGNDGASSISYPAAYSSVIAVGSVTSNRTRSSFSNYGSGLEVMAPGSNIYSTYPNSRYTSLSGTSMATPHVAGVAGLIRAANPDISVAQARQILRDTAQEAGSFTQYGYGIVDAHAAVVAASGGSGG

SEQ ID NO: 481 - DNA, 1239 bp, synthetic construct
  misc_feature 1..1239: note = Variant of serine peptidase from Bacillus sinesaloumensis
  source 1..1239: mol_type = other DNA
atggcagatcaagctagtcaagctaatggaaaccaggacgtcattgaaggcgagctgatcgtttcagtggaaccgaagaacggtaaacctgatgtgagcattcaaagtgcacaatccgtaacagggcaggaagacgtccttaaatcgaaaggctttacgatcgttgataccttgcatgtagaggatagcagcgtcaagccactcgtctcgaagaatttcaataagaaagtggtggagaagatgggactggtgtatcttgttcaatactctccggaccagtttaaaagttccaacattgcgaagaaagaactcagaaaagaattgatggatctgggctttaaagtccgctatataagcgaaaattacaagatgatggcgatcgaaggtacagccactcttcaggcagtacaccctaaccaaaactggcattataatatgattaaagctccggaagcgtgggctattacgtctggatcctctagcgttaaagtagcagtcctggatacagggatcgaccataatcacccatccttggccaacttcgtgaatactaatcttggctcttcgtttgttggaggaaacaccatggatgttcaaggtcatggcacacatgttgctggcacgattgcatcttatgggagtgtaagcggagtgatgcagagtgcgacactgatcccggtcaaagtgctcgataattctggcagcgggtccctttacggtattacgcaaggcatattgtatgccgccgacatcgatgcggacgtcattaacatgtctctgggtggaggaggctataatcagagcatggatgaggctgttcaaacagcagttgctcagggaaccattgtagtagcagcgactggcaatgatggtgcatcgtcgatcagttatcctgctgcctacagcagcgtcattgcggtgggatctgtgacgtccaatcgtacacgatcctcgttttctaactatggatctgggcttgaagttatggcaccgggcagcaacatctacagtacgtatcctaattccagatatacatctttgagtggtacaagcatggctactccgcacgttgcgggcgtagctgggctcattcgcgcagccaacccagacatatctgtcgcgcaagcccgtcagattctgcgggataccgcgcaagaagcaggatcgttcacacagtacggctatggaatcgtcgatgctcatgccgccgttgttgctgcatccggtggtagcggcggc

SEQ ID NO: 482 - protein, 413 aa, synthetic construct
  REGION 1..413: note = Variant of serine peptidase from Bacillus sinesaloumensis
MADQASQANGNQDVIEGELIVSVEPKNGKPDVSIQSAQSVTGQEDVLKSKGFTIVDTLHVEDSSVKPLVSKNFNKKVVEKMGLVYLVQYSPDQFKSSNIAKKELRKELMDLGFKVRYISENYKMMAIEGTATLQAVHPNQNWHYNMIKAPEAWAITSGSSSVKVAVLDTGIDHNHPSLANFVNTNLGSSFVGGNTMDVQGHGTHVAGTIASYGSVSGVMQSATLIPVKVLDNSGSGSLYGITQGILYAADIDADVINMSLGGGGYNQSMDEAVQTAVAQGTIVVAATGNDGASSISYPAAYSSVIAVGSVTSNRTRSSFSNYGSGLEVMAPGSNIYSTYPNSRYTSLSGTSMATPHVAGVAGLIRAANPDISVAQARQILRDTAQEAGSFTQYGYGIVDAHAAVVAASGGSGG

SEQ ID NO: 483 - DNA, 1239 bp, synthetic construct
  misc_feature 1..1239: note = Variant of serine peptidase from Bacillus sinesaloumensis
  source 1..1239: mol_type = other DNA
atggcagatcaagctagtcaagctaatggaaaccaggacgtcattgaaggcgagctgatcgtttcagtggaaccgaagaacggtaaacctgatgtgagcattcaaagtgcacaatccgtaacagggcaggaagacgtccttaaatcgaaaggctttacgatcgttgataccttgcatgtagaggatagcagcgtcaagccactcgtctcgaagaatttcaataagaaagtggtggagaagatgggactggtgtatcttgttcaatactctccggaccagtttaaaagttccaacattgcgaagaaagaactcagaaaagaattgatggatctgggctttaaagtccgctatataagcgaaaattacaagatgatggcgatcgaaggtacagccactcttcaggcagtacaccctaaccaaaactggcattataatatgattaaagctccggaagcgtgggctattacgtctggatcctctagcgttaaagtagcagtcctggatacagggatcgaccataatcacccatccttggccaacttcgtgaatactaatcttggccggtcgtttgttggaggaaacaccatggatgttcaaggtcatggcacacatgttgctggcacgattgcatcttatgggagtgtaagcggagtgatgcagagtgcgacactgatcccggtcaaagtgctcgataattctggcagcgggtccctttacggtattacgcaaggcatattgtatgccgccgacatcgatgcggacgtcattaacatgtctctgggtggaggaggctataatcagagcatggatgaggctgttcaaacagcagttgctcagggaaccattgtagtagcagcgactggcaatgatggtgcatcgtcgatcagttatcctgctgcctacagcagcgtcattgcggtgggatctgtgacgtccaatcgtacacgatcctcgttttctaactatggatctgggcttgaagttatggcaccgggcagcaacatctacagtacgtggcctaattccagatatacatctttgagtggtacaagcatggctactccgcacgttgcgggcgtagctgggctcattcgcgcagccaacccagacatatctgtcgcgcaagcccgtcagattctgcgggataccgcgcaagaagcaggatcgttcacacagtacggctatggaatcgtcgatgctcatgccgccgttgttgctgcatccggtggtagcggcggc

SEQ ID NO: 484 - protein, 413 aa, synthetic construct
  REGION 1..413: note = Variant of serine peptidase from Bacillus sinesaloumensis
MADQASQANGNQDVIEGELIVSVEPKNGKPDVSIQSAQSVTGQEDVLKSKGFTIVDTLHVEDSSVKPLVSKNFNKKVVEKMGLVYLVQYSPDQFKSSNIAKKELRKELMDLGFKVRYISENYKMMAIEGTATLQAVHPNQNWHYNMIKAPEAWAITSGSSSVKVAVLDTGIDHNHPSLANFVNTNLGRSFVGGNTMDVQGHGTHVAGTIASYGSVSGVMQSATLIPVKVLDNSGSGSLYGITQGILYAADIDADVINMSLGGGGYNQSMDEAVQTAVAQGTIVVAATGNDGASSISYPAAYSSVIAVGSVTSNRTRSSFSNYGSGLEVMAPGSNIYSTWPNSRYTSLSGTSMATPHVAGVAGLIRAANPDISVAQARQILRDTAQEAGSFTQYGYGIVDAHAAVVAASGGSGG

SEQ ID NO: 485 - DNA, 1239 bp, synthetic construct
  misc_feature 1..1239: note = Variant of serine peptidase from Bacillus sinesaloumensis
  source 1..1239: mol_type = other DNA
atggcagatcaagctagtcaagctaatggaaaccaggacgtcattgaaggcgagctgatcgtttcagtggaaccgaagaacggtaaacctgatgtgagcattcaaagtgcacaatccgtaacagggcaggaagacgtccttaaatcgaaaggctttacgatcgttgataccttgcatgtagaggatagcagcgtcaagccactcgtctcgaagaatttcaataagaaagtggtggagaagatgggactggtgtatcttgttcaatactctccggaccagtttaaaagttccaacattgtgaagaaagaactcagaaaagaattgatggatctgggctttaaagtccgctatataagcgaaaattacaagatgatggcgatcgaaggtacagccactcttcaggcagtacaccctaaccaaaactggcattataatatgattaaagctccggaagcgtgggctattacgtctggatcctctagcgttaaagtagcagtcctggatacagggatcgaccataatcacccatccttggccaacttcgtgaatactaatcttggccggtcgtttgttggaggaaacaccatggatgttcaaggtcatggcacacatgttgctggcacgattgcatcttatgggagtgtaagcggagtgatgcagagtgcgacactgatcccggtcaaagtgctcgataattctggcagcgggtccctttacggtattacgcaaggcatattgtatgccgccgactcggatgcggacgtcattaacatgtctctgggtggaggaggctataatcagagcatggatgaggctgttcaaacagcagttgctcagggaaccattgtagtagcagcgactggcaatgatggtgcatcgtcgatcagttatcctgctgcctacagcagcgtcattgcggtgggatctgtgacgtccaatcgtacacgatcctcgttttctaactatggatctgggcttgaagttatggcaccgggcagcaacatctacagtacgtatcctaattccagatatacatctttgagtggtacaagcatggctactccgcacgttgcgggcgtagctgggctcattcgcgcagccaacccagacatatctgtcgcgcaagcccgtcagattctgcgggataccgcgcaagaagcaggatcgttcacacagtacggctatggaatcgtcgatgctcatgccgccgttgttgctgcatccggtggtagcggcggc

SEQ ID NO: 486 - protein, 413 aa, synthetic construct
  REGION 1..413: note = Variant of serine peptidase from Bacillus sinesaloumensis
MADQASQANGNQDVIEGELIVSVEPKNGKPDVSIQSAQSVTGQEDVLKSKGFTIVDTLHVEDSSVKPLVSKNFNKKVVEKMGLVYLVQYSPDQFKSSNIVKKELRKELMDLGFKVRYISENYKMMAIEGTATLQAVHPNQNWHYNMIKAPEAWAITSGSSSVKVAVLDTGIDHNHPSLANFVNTNLGRSFVGGNTMDVQGHGTHVAGTIASYGSVSGVMQSATLIPVKVLDNSGSGSLYGITQGILYAADSDADVINMSLGGGGYNQSMDEAVQTAVAQGTIVVAATGNDGASSISYPAAYSSVIAVGSVTSNRTRSSFSNYGSGLEVMAPGSNIYSTYPNSRYTSLSGTSMATPHVAGVAGLIRAANPDISVAQARQILRDTAQEAGSFTQYGYGIVDAHAAVVAASGGSGG

SEQ ID NO: 487 - DNA, 1239 bp, synthetic construct
  misc_feature 1..1239: note = Variant of serine peptidase from Bacillus sinesaloumensis
  source 1..1239: mol_type = other DNA
atggcagatcaagctagtcaagctaatggaaaccaggacgtcattgaaggcgagctgatcgtttcagtggaaccgaagaacggtaaacctgatgtgagcattcaaagtgcacaatccgtaacagggcaggaagacgtccttaaatcgaaaggctttacgatcgttgataccttgcatgtagaggatagcagcgtcaagccactcgtctcgaagaatttcaataagaaagtggtggagaagatgggactggtgtatcttgttcaatactctccggaccagtttaaaagttccaacattgcgaagaaagaactcagaaaagaattgatggatctgggctttaaagtccgctatataagcgaaaattacaagatgatggcgatcgaaggtacagtgactcttcaggcagtacaccctaaccaaaactggcattataatatgattaaagctccggaagcgtgggctattacgtctggatcctctagcgttaaagtagcagtcctggatacagggatcgaccataatcacccatccttggccaacttcgtgaatactaatcttggccggtcgtttgttggaggaaacaccatggatgttcaaggtcatggcacacatgttgctggcacgattgcatcttatgggagtgtaagcggagtgatgcagagtgcgacactgatcccggtcaaagtgctcgataattctggcagcgggtccctttacggtattacgcaaggcatattgtatgccgccgacatcgatgcggacgtcattaacatgtctctgggtggaggaggctataatcagagcatggatgaggctgttcaaacagcagttgctcagggaaccattgtagtagcagcgactggcaatgatggtgcatcgtcgatcagttatcctgctgcctacagcagcgtcattgcggtgggatctgtgacgtccaatcgtacacgatcctcgttttctaactatggatctgggcttgaagttatggcaccgggcagcaacatctacagtacgtatcctaattccagatatacatctttgagtggtacaagcatggctactccgcacgttgcgggcgtagctgggctcattcgcgcagccaacccagacatatctgtcgcgcaagcccgtcagattctgcgggataccgcgcaagaagcaggatcgttcacacagtacggctatggaatcgtcgatgctcatgccgccgttgttgctgcatccggtggtagcggcggc

SEQ ID NO: 488 - protein, 413 aa, synthetic construct
  REGION 1..413: note = Variant of serine peptidase from Bacillus sinesaloumensis
MADQASQANGNQDVIEGELIVSVEPKNGKPDVSIQSAQSVTGQEDVLKSKGFTIVDTLHVEDSSVKPLVSKNFNKKVVEKMGLVYLVQYSPDQFKSSNIAKKELRKELMDLGFKVRYISENYKMMAIEGTVTLQAVHPNQNWHYNMIKAPEAWAITSGSSSVKVAVLDTGIDHNHPSLANFVNTNLGRSFVGGNTMDVQGHGTHVAGTIASYGSVSGVMQSATLIPVKVLDNSGSGSLYGITQGILYAADIDADVINMSLGGGGYNQSMDEAVQTAVAQGTIVVAATGNDGASSISYPAAYSSVIAVGSVTSNRTRSSFSNYGSGLEVMAPGSNIYSTYPNSRYTSLSGTSMATPHVAGVAGLIRAANPDISVAQARQILRDTAQEAGSFTQYGYGIVDAHAAVVAASGGSGG

SEQ ID NO: 489 - DNA, 1239 bp, synthetic construct
  misc_feature 1..1239: note = Variant of serine peptidase from Bacillus sinesaloumensis
  source 1..1239: mol_type = other DNA
atggcagatcaagctagtcaagctaatggaaaccaggacgtcattgaaggcgagctgatcgtttcagtggaaccgaagaacggtaaacctgatgtgagcattcaaagtgcacaatccgtaacagggcaggaagacgtccttaaatcgaaaggctttacgatcgttgataccttgcatgtagaggatagcagcgtcaagccactcgtctcgaagaatttcaataagaaagtggtggagaagatgggactggtgtatcttgttcaatactctccggaccagtttaaaagttccaacattgcgaagaaagaactcagaaaagaattgatggatctgggctttaaagtccgctatataagcgaaaattacaagatgatggcgatcgaaggtacagccactcttcaggcagtacaccctaaccaaaactggcattataatatgattaaagctccggaagcgtgggctattacgtctggatcctctagcgttaaagtagcagtcctggatacagggatcgaccataatcacccatccttggccaacttcgtgaatactaatcttggcacttcgtttgttggaggaaacaccatggatgttcaaggtcatggcacacatgttgctggcacgattgcatcttatgggagtgtaagcggagtgatgcagagtgcgacactgatcccggtcaaagtgctcgataattctggcagcgggtccctttacggtattacgcaaggcatattgtatgccgccgacatcgatgcggacgtcattaacatgtctctgggtggaggaggctataatcagagcatggatgaggctgttcaaacagcagttgctcagggaaccattgtagtagcagcgactggcaatgatggtgcatcgtcgatcagttatcctgctgcctacagcagcgtcattgcggtgggatctgtgacgtccaatcgtacacgatcctcgttttctaactatggatctgggcttgaagttatggcaccgggcagcaacatctacagtacgtatcctaattccagatatacatctttgagtggtacaagcatggctactccgcacgttgcgggcgtagctgggctcattcgcgcagccaacccagacatatctgtcgcgcaagcccgtcagattctgcgggataccgcgcaagaagcaggatcgttcacacagtacggctatggaatcgtcgatgctcatgccgccgttgttgctgcatccggtggtagcggcggc

SEQ ID NO: 490 - protein, 413 aa, synthetic construct
  REGION 1..413: note = Variant of serine peptidase from Bacillus sinesaloumensis
MADQASQANGNQDVIEGELIVSVEPKNGKPDVSIQSAQSVTGQEDVLKSKGFTIVDTLHVEDSSVKPLVSKNFNKKVVEKMGLVYLVQYSPDQFKSSNIAKKELRKELMDLGFKVRYISENYKMMAIEGTATLQAVHPNQNWHYNMIKAPEAWAITSGSSSVKVAVLDTGIDHNHPSLANFVNTNLGTSFVGGNTMDVQGHGTHVAGTIASYGSVSGVMQSATLIPVKVLDNSGSGSLYGITQGILYAADIDADVINMSLGGGGYNQSMDEAVQTAVAQGTIVVAATGNDGASSISYPAAYSSVIAVGSVTSNRTRSSFSNYGSGLEVMAPGSNIYSTYPNSRYTSLSGTSMATPHVAGVAGLIRAANPDISVAQARQILRDTAQEAGSFTQYGYGIVDAHAAVVAASGGSGG

SEQ ID NO: 491 - DNA, 1239 bp, synthetic construct
  misc_feature 1..1239: note = Variant of serine peptidase from Bacillus sinesaloumensis
  source 1..1239: mol_type = other DNA
atggcagatcaagctagtcaagctaatggaaaccaggacgtcattgaaggcgagctgatcgtttcagtggaaccgaagaacggtaaacctgatgtgagcattcaaagtgcacaatccgtaacagggcaggaagacgtccttaaatcgaaaggctttacgatcgttgataccttgcatgtagaggatagcagcgtcaagccactcgtctcgaagaatttcaataagaaagtggtggagaagatgggactggtgtatcttgttcaatactctccggaccagtttaaaagttccaacattgcgaagaaagaactcagaaaagaattgatggatctgggctttaaagtccgctatataagcgaaaattacaagatgatggcgatcgaaggtacagccactcttcaggcagtacaccctaaccaattgtggcattataatatgattaaagctccggaagcgtgggctattacgtctggatcctctagcgttaaagtagcagtcctggatacagggatcgaccataatcacccatccttggccaacttcgtgaatactaatcttggccggtcgtttgttggaggaaacaccatggatgttcaaggtcatggcacacatgttgctggcacgattgcatcttatgggagtgtaagcggagtgatgcagagtgcgacactgatcccggtcaaagtgctcgataattctggcagcgggtccctttacggtattacgcaaggcatattgtatgccgccgacatcgatgcggacgtcattaacatgtctctgggtggaggaggctataatcagagcatggatgaggctgttcaaacagcagttgctcagggaaccattgtagtagcagcgactggcaatgatggtgcatcgtcgatcagttatcctgctgcctacagcagcgtcattgcggtgggatctgtgacgtccaatcgtacacgatcctcgttttctaactatggatctgggcttgaagttatggcaccgggcagcaacatctacagtacgtatcctaattccagatatacatctttgagtggtacaagcatggctactccgcacgttgcgggcgtagctgggctcattcgcgcagccaacccagacatatctgtcgcgcaagcccgtcagattctgcgggataccgcgcaagaagcaggatcgttcacacagtacggctatggaatcgtcgatgctcatgccgccgttgttgctgcatccggtggtagcggcggc

SEQ ID NO: 492 - protein, 413 aa, synthetic construct
  REGION 1..413: note = Variant of serine peptidase from Bacillus sinesaloumensis
MADQASQANGNQDVIEGELIVSVEPKNGKPDVSIQSAQSVTGQEDVLKSKGFTIVDTLHVEDSSVKPLVSKNFNKKVVEKMGLVYLVQYSPDQFKSSNIAKKELRKELMDLGFKVRYISENYKMMAIEGTATLQAVHPNQLWHYNMIKAPEAWAITSGSSSVKVAVLDTGIDHNHPSLANFVNTNLGRSFVGGNTMDVQGHGTHVAGTIASYGSVSGVMQSATLIPVKVLDNSGSGSLYGITQGILYAADIDADVINMSLGGGGYNQSMDEAVQTAVAQGTIVVAATGNDGASSISYPAAYSSVIAVGSVTSNRTRSSFSNYGSGLEVMAPGSNIYSTYPNSRYTSLSGTSMATPHVAGVAGLIRAANPDISVAQARQILRDTAQEAGSFTQYGYGIVDAHAAVVAASGGSGG

SEQ ID NO: 493 - DNA, 1239 bp, synthetic construct
  misc_feature 1..1239: note = Variant of serine peptidase from Bacillus sinesaloumensis
  source 1..1239: mol_type = other DNA
atggcagatcaagctagtcaagctaatggaaaccaggacgtcattgaaggcgagctgatcgtttcagtggaaccgaagaacggtaaacctgatgtgagcattcaaagtgcacaatccgtaacagggcaggaagacgtccttaaatcgaaaggctttacgatcgttgataccttgcatgtagaggatagcagcgtcaagccactcgtctcgaagaatttcaataagaaagtggtggagaagatgggactggtgtatcttgttcaatactctccggaccagtttaaaagttccaacattgcgaagaaagaactcagaaaagaattgatggatctgggctttaaagtccgctatataagcgaaaattacaagatgatggcgatcgaaggtacagccactctttatgcagtacaccctaaccaaaactggcattataatatgattaaagctccggaagcgtgggctattacgtctggatcctctagcgttaaagtagcagtcctggatacagggatcgaccataatcacccatccttggccaacttcgtgaatactaatcttggccggtcgtttgttggaggaaacaccatggatgttcaaggtcatggcacacatgttgctggcacgattgcatcttatgggagtgtaagcggagtgatgcagagtgcgacactgatcccggtcaaagtgctcgataattctggcagcgggtccctttacggtattacgcaaggcatattgtatgccgccgacatcgatgcggacgtcattaacatgtctctgggtggaggaggctataatcagagcatggatgaggctgttcaaacagcagttgctcagggaaccattgtagtagcagcgactggcaatgatggtgcatcgtcgatcagttatcctgctgcctacagcagcgtcattgcggtgggatctgtgacgtccaatcgtacacgatcctcgttttctaactatggatctgggcttgaagttatggcaccgggcagcaacatctacagtacgtatcctaattccagatatacatctttgagtggtacaagcatggctactccgcacgttgcgggcgtagctgggctcattcgcgcagccaacccagacatatctgtcgcgcaagcccgtcagattctgcgggataccgcgcaagaagcaggatcgttcacacagtacggctatggaatcgtcgatgctcatgccgccgttgttgctgcatccggtggtagcggcggc

SEQ ID NO: 494 - protein, 413 aa, synthetic construct
  REGION 1..413: note = Variant of serine peptidase from Bacillus sinesaloumensis
MADQASQANGNQDVIEGELIVSVEPKNGKPDVSIQSAQSVTGQEDVLKSKGFTIVDTLHVEDSSVKPLVSKNFNKKVVEKMGLVYLVQYSPDQFKSSNIAKKELRKELMDLGFKVRYISENYKMMAIEGTATLYAVHPNQNWHYNMIKAPEAWAITSGSSSVKVAVLDTGIDHNHPSLANFVNTNLGRSFVGGNTMDVQGHGTHVAGTIASYGSVSGVMQSATLIPVKVLDNSGSGSLYGITQGILYAADIDADVINMSLGGGGYNQSMDEAVQTAVAQGTIVVAATGNDGASSISYPAAYSSVIAVGSVTSNRTRSSFSNYGSGLEVMAPGSNIYSTYPNSRYTSLSGTSMATPHVAGVAGLIRAANPDISVAQARQILRDTAQEAGSFTQYGYGIVDAHAAVVAASGGSGG

SEQ ID NO: 495 - DNA, 1239 bp, synthetic construct
  misc_feature 1..1239: note = Variant of serine peptidase from Bacillus sinesaloumensis
  source 1..1239: mol_type = other DNA
atggcagatcaagctagtcaagctaatggaaaccaggacgtcattgaaggcgagctgatcgtttcagtggaaccgaagaacggtaaacctgatgtgagcattcaaagtgcacaatccgtaacagggcaggaagacgtccttaaatcgaaaggctttacgatcgttgataccttgcatgtagaggatagcagcgtcaagccactcgtctcgaagaatttcaataagaaagtggtggagaagatgggactggtgtatcttgttcaatactctccggaccagtttaaaagttccaacattgcgaagaaagaactcagaaaagaattgatggatctgggctttaaagtccgctatataagcgaaaattacaagatgatggcgatcgaaggtacagccactcttcaggcagtacaccctaaccaaaactggcattataatatgattaaagctccggaagcgtgggctattacgtctggatcctctagcgttaaagtagcagtcctggatacagggatcgaccataatcacccatccttggccaacttcgtgaatactaatcttggccggtcgtttgttggaggaaacaccatggatgttcaaggtcatggcacacatgttgctggcacgattgcatcttatgggagtgtaagcggagtgatgcagagtgcgacactgatcccggtcaaagtgctcgataattctggcagcgggtccctttacggtattacgcaaggcatattgtatgccgccgacatcgatgcggacgtcattaacatgtctctgggtggaggaggctataatatgagcatggatgaggctgttcaaacagcagttgctcagggaaccattgtagtagcagcgactggcaatgatggtgcatcgtcgatcagttatcctgctgcctacagcagcgtcattgcggtgggatctgtgacgtccaatcgtacacgatcctcgttttctaactatggatctgggcttgaagttatggcaccgggcagcaacatctacagtacgtatcctaattccagatatacatctttgagtggtacaagcatggctactccgcacgttgcgggcgtagctgggctcattcgcgcagccaacccagacatatctgtcgcgcaagcccgtcagattctgcgggataccgcgcaagaagcaggatcgttcacacagtacggctatggaatcgtcgatgctcatgccgccgttgttgctgcatccggtggtagcggcggc

SEQ ID NO: 496 - protein, 413 aa, synthetic construct
  REGION 1..413: note = Variant of serine peptidase from Bacillus sinesaloumensis
MADQASQANGNQDVIEGELIVSVEPKNGKPDVSIQSAQSVTGQEDVLKSKGFTIVDTLHVEDSSVKPLVSKNFNKKVVEKMGLVYLVQYSPDQFKSSNIAKKELRKELMDLGFKVRYISENYKMMAIEGTATLQAVHPNQNWHYNMIKAPEAWAITSGSSSVKVAVLDTGIDHNHPSLANFVNTNLGRSFVGGNTMDVQGHGTHVAGTIASYGSVSGVMQSATLIPVKVLDNSGSGSLYGITQGILYAADIDADVINMSLGGGGYNMSMDEAVQTAVAQGTIVVAATGNDGASSISYPAAYSSVIAVGSVTSNRTRSSFSNYGSGLEVMAPGSNIYSTYPNSRYTSLSGTSMATPHVAGVAGLIRAANPDISVAQARQILRDTAQEAGSFTQYGYGIVDAHAAVVAASGGSGG

SEQ ID NO: 497 - DNA, 1239 bp, synthetic construct
  misc_feature 1..1239: note = Variant of serine peptidase from Bacillus sinesaloumensis
  source 1..1239: mol_type = other DNA
atggcagatcaagctagtcaagctaatggaaaccaggacgtcattgaaggcgagctgatcgtttcagtggaaccgaagaacggtaaacctgatgtgagcattcaaagtgcacaatccgtaacagggcaggaagacgtccttaaatcgaaaggctttacgatcgttgataccttgcatgtagaggatagcagcgtcaagccactcgtctcgaagaatttcaataagaaagtggtggagaagatgggactggtgtatcttgttcaatactctccggaccagtttaaaagttccaacattgcgaagaaagaactcagaaaagaattgatggatctgggctttaaagtccgctatataagcgaaaattacaagatgatggcgatcgaaggtacagccactcttcaggcagtacaccctaaccaaaactggcattataatatgattaaagctccggaagcgtgggctattacgtctggatcctctagcgttaaagtagcagtcctggatacagggatcgaccataatcacccatccttggccaacttcgtgaatactaatcttggccggtcgtttgttggaggaaacaccatggatgttcaaggtcatggcacacatgttgctggcacgattgcatcttatgggagtgtaagcggagtgatgcagagtgcgacactgatcccggtcaaagtgctcgataattctggcagcgggtccctttacggtattacgcaaggcatattgtatgccgccgacatcgatgcggacgtcattaacatgtctctgggtggaggaaattataatcagagcatggatgaggctgttcaaacagcagttgctcagggaaccattgtagtagcagcgactggcaatgatggtgcatcgtcgatcagttatcctgctgcctacagcagcgtcattgcggtgggatctgtgacgtccaatcgtacacgatcctcgttttctaactatggatctgggcttgaagttatggcaccgggcagcaacatctacagtacgtatcctaattccagatatacatctttgagtggtacaagcatggctactccgcacgttgcgggcgtagctgggctcattcgcgcagccaacccagacatatctgtcgcgcaagcccgtcagattctgcgggataccgcgcaagaagcaggatcgttcacacagtacggctatggaatcgtcgatgctcatgccgccgttgttgctgcatccggtggtagcggcggc

SEQ ID NO: 498 - protein, 413 aa, synthetic construct
  REGION 1..413: note = Variant of serine peptidase from Bacillus sinesaloumensis
MADQASQANGNQDVIEGELIVSVEPKNGKPDVSIQSAQSVTGQEDVLKSKGFTIVDTLHVEDSSVKPLVSKNFNKKVVEKMGLVYLVQYSPDQFKSSNIAKKELRKELMDLGFKVRYISENYKMMAIEGTATLQAVHPNQNWHYNMIKAPEAWAITSGSSSVKVAVLDTGIDHNHPSLANFVNTNLGRSFVGGNTMDVQGHGTHVAGTIASYGSVSGVMQSATLIPVKVLDNSGSGSLYGITQGILYAADIDADVINMSLGGGNYNQSMDEAVQTAVAQGTIVVAATGNDGASSISYPAAYSSVIAVGSVTSNRTRSSFSNYGSGLEVMAPGSNIYSTYPNSRYTSLSGTSMATPHVAGVAGLIRAANPDISVAQARQILRDTAQEAGSFTQYGYGIVDAHAAVVAASGGSGG

SEQ ID NO: 499 - DNA, 1239 bp, synthetic construct
  misc_feature 1..1239: note = Variant of serine peptidase from Bacillus sinesaloumensis
  source 1..1239: mol_type = other DNA
atggcagatcaagctagtcaagctaatggaaaccaggacgtcattgaaggcgagctgatcgtttcagtggaaccgaagaacggtaaacctgatgtgagcattcaaagtgcacaatccgtaacagggcaggaagacgtccttaaatcgaaaggctttacgatcgttgataccttgcatgtagaggatagcagcgtcaagccactcgtctcgaagaatttcaataagaaagtggtggagaagatgggactggtgtatcttgttcaatactctccggaccagtttaaaagttccaacattgcgaagaaagaactcagaaaagaattgatggatctgggctttaaagtccgctatataagcgaaaattacaagatgatggcgatcgaaggtacagccactcttggggcagtacaccctaaccaaaactggcattataatatgattaaagctccggaagcgtgggctattacgtctggatcctctagcgttaaagtagcagtcctggatacagggatcgaccataatcacccatccttggccaacttcgtgaatactaatcttggccggtcgtttgttggaggaaacaccatggatgttcaaggtcatggcacacatgttgctggcacgattgcatcttatgggagtgtaagcggagtgatgcagagtgcgacactgatcccggtcaaagtgctcgataattctggcagcgggtccctttacggtattacgcaaggcatattgtatgccgccgacatcgatgcggacgtcattaacatgtctctgggtggaggaggctataatcagagcatggatgaggctgttcaaacagcagttgctcagggaaccattgtagtagcagcgactggcaatgatggtgcatcgtcgatcagttatcctgctgcctacagcagcgtcattgcggtgggatctgtgacgtccaatcgtacacgatcctcgttttctaactatggatctgggcttgaagttatggcaccgggcagcaacatctacagtacgtatcctaattccagatatacatctttgagtggtacaagcatggctactccgcacgttgcgggcgtagctgggctcattcgcgcagccaacccagacatatctgtcgcgcaagcccgtcagattctgcgggataccgcgcaagaagcaggatcgttcacacagtacggctatggaatcgtcgatgctcatgccgccgttgttgctgcatccggtggtagcggcggc

SEQ ID NO: 500 - protein, 413 aa, synthetic construct
  REGION 1..413: note = Variant of serine peptidase from Bacillus sinesaloumensis
MADQASQANGNQDVIEGELIVSVEPKNGKPDVSIQSAQSVTGQEDVLKSKGFTIVDTLHVEDSSVKPLVSKNFNKKVVEKMGLVYLVQYSPDQFKSSNIAKKELRKELMDLGFKVRYISENYKMMAIEGTATLGAVHPNQNWHYNMIKAPEAWAITSGSSSVKVAVLDTGIDHNHPSLANFVNTNLGRSFVGGNTMDVQGHGTHVAGTIASYGSVSGVMQSATLIPVKVLDNSGSGSLYGITQGILYAADIDADVINMSLGGGGYNQSMDEAVQTAVAQGTIVVAATGNDGASSISYPAAYSSVIAVGSVTSNRTRSSFSNYGSGLEVMAPGSNIYSTYPNSRYTSLSGTSMATPHVAGVAGLIRAANPDISVAQARQILRDTAQEAGSFTQYGYGIVDAHAAVVAASGGSGG

SEQ ID NO: 501 - DNA, 1239 bp, synthetic construct
  misc_feature 1..1239: note = Variant of serine peptidase from Bacillus sinesaloumensis
  source 1..1239: mol_type = other DNA
atggcagatcaagctagtcaagctaatggaaaccaggacgtcattgaaggcgagctgatcgtttcagtggaaccgaagaacggtaaacctgatgtgagcattcaaagtgcacaatccgtaacagggcaggaagacgtccttaaatcgaaaggctttacgatcgttgataccttgcatgtagaggatagcagcgtcaagccactcgtctcgaagaatttcaataagaaagtggtggagaagatgggactggtgtatcttgttcaatactctccggaccagtttaaaagttccaacattgcgaagaaagaactcagaaaagaattgatggatctgggctttaaagtccgctatataagcgaaaattacaagatgatggcgatcgaaggtacagccactcttcaggcagtacaccctaaccaaaactggcattataatatgattaaagctccggaagcgtgggctattacgtctggatcctctagcgttaaagtagcagtcctggatacagggatcgaccataatcacccatccttggccaacttcgtgaatactcttcttggccggtcgtttgttggaggaaacaccatggatgttcaaggtcatggcacacatgttgctggcacgattgcatcttatgggagtgtaagcggagtgatgcagagtgcgacactgatcccggtcaaagtgctcgataattctggcagcgggtccctttacggtattacgcaaggcatattgtatgccgccgacatcgatgcggacgtcattaacatgtctctgggtggaggaggctataatcagagcatggatgaggctgttcaaacagcagttgctcagggaaccattgtagtagcagcgactggcaatgatggtgcatcgtcgatcagttatcctgctgcctacagcagcgtcattgcggtgggatctgtgacgtccaatcgtacacgatcctcgttttctaactatggatctgggcttgaagttatggcaccgggcagcaacatctacagtacgtatcctaattccagatatacatctttgagtggtacaagcatggctactccgcacgttgcgggcgtagctgggctcattcgcgcagccaacccagacatatctgtcgcgcaagcccgtcagattctgcgggataccgcgcaagaagcaggatcgttcacacagtacggctatggaatcgtcgatgctcatgccgccgttgttgctgcatccggtggtagcggcggc

SEQ ID NO: 502 - protein, 413 aa, synthetic construct
  REGION 1..413: note = Variant of serine peptidase from Bacillus sinesaloumensis
MADQASQANGNQDVIEGELIVSVEPKNGKPDVSIQSAQSVTGQEDVLKSKGFTIVDTLHVEDSSVKPLVSKNFNKKVVEKMGLVYLVQYSPDQFKSSNIAKKELRKELMDLGFKVRYISENYKMMAIEGTATLQAVHPNQNWHYNMIKAPEAWAITSGSSSVKVAVLDTGIDHNHPSLANFVNTLLGRSFVGGNTMDVQGHGTHVAGTIASYGSVSGVMQSATLIPVKVLDNSGSGSLYGITQGILYAADIDADVINMSLGGGGYNQSMDEAVQTAVAQGTIVVAATGNDGASSISYPAAYSSVIAVGSVTSNRTRSSFSNYGSGLEVMAPGSNIYSTYPNSRYTSLSGTSMATPHVAGVAGLIRAANPDISVAQARQILRDTAQEAGSFTQYGYGIVDAHAAVVAASGGSGG

SEQ ID NO: 503 - DNA, 1239 bp, synthetic construct
  misc_feature 1..1239: note = Variant of serine peptidase from Bacillus sinesaloumensis
  source 1..1239: mol_type = other DNA
atggcagatcaagctagtcaagctaatggaaaccaggacgtcattgaaggcgagctgatcgtttcagtggaaccgaagaacggtaaacctgatgtgagcattcaaagtgcacaatccgtaacagggcaggaagacgtccttaaatcgaaaggctttacgatcgttgataccttgcatgtagaggatagcagcgtcaagccactcgtctcgaagaatttcaataagaaagtggtggagaagatgggactggtgtatcttgttcaatactctccggaccagtttaaaagttccaacattgcgaagaaagaactcagaaaagaattgatggatctgggctttaaagtccgctatataagcgaaaattacaagatgatggcgatcgaaggtacagccactcttcaggcagtacaccctaaccaaaactggcattataatatgattaaagctccggaagcgtgggctattacgtctggatcctctagcgttaaagtagcagtcctggatacagggatcgaccataatcacccatccttggccaacttcgtgaatactaatcttggccggtcgtttgttggaggaaacaccatggatgttcaaggtcatggcacacatgttgctggcacgattgcatcttatgggagtgtaagcggagtgatgcagagtgcgacactgatcccggtcaaagtgctcgataattctggcagcgggtccctttacggtattacgcaaggcatattgtatgccgccgacatcgatgcggacgtcattaacatgtctctgggtggaggaggctataatcagagcatggatgaggctgttcaaacagcagttgctcagggaaccattgtagtagcagcgactggcaatgatggtgcatcgtcgatcagttatcctgctgcctacagcagcgtcattgcggtgggatctgtgacgtccaatcgtacacgatcctcgttttctaactatggatctgggcttgaagttatggcaccgggcagcaacatctacagtacgtatcctaattccagatatacatctttgagtggtacaagcatggctactccgcacgttgcgggcgtagctgggctcattcgcgcagccaacccatctatatctgtcgcgcaagcccgtcagattctgcgggataccgcgcaagaagcaggatcgttcacacagtacggctatggaatcgtcgatgctcatgccgccgttgttgctgcatccggtggtagcggcggc

SEQ ID NO: 504 - protein, 413 aa, synthetic construct
  REGION 1..413: note = Variant of serine peptidase from Bacillus sinesaloumensis
MADQASQANGNQDVIEGELIVSVEPKNGKPDVSIQSAQSVTGQEDVLKSKGFTIVDTLHVEDSSVKPLVSKNFNKKVVEKMGLVYLVQYSPDQFKSSNIAKKELRKELMDLGFKVRYISENYKMMAIEGTATLQAVHPNQNWHYNMIKAPEAWAITSGSSSVKVAVLDTGIDHNHPSLANFVNTNLGRSFVGGNTMDVQGHGTHVAGTIASYGSVSGVMQSATLIPVKVLDNSGSGSLYGITQGILYAADIDADVINMSLGGGGYNQSMDEAVQTAVAQGTIVVAATGNDGASSISYPAAYSSVIAVGSVTSNRTRSSFSNYGSGLEVMAPGSNIYSTYPNSRYTSLSGTSMATPHVAGVAGLIRAANPSISVAQARQILRDTAQEAGSFTQYGYGIVDAHAAVVAASGGSGG

SEQ ID NO: 505 - DNA, 1239 bp, synthetic construct
  misc_feature 1..1239: note = Variant of serine peptidase from Bacillus sinesaloumensis
  source 1..1239: mol_type = other DNA
atggcagatcaagctagtcaagctaatggaaaccaggacgtcattgaaggcgagctgatcgtttcagtggaaccgaagaacggtaaacctgatgtgagcattcaaagtgcacaatccgtaacagggcaggaagacgtccttaaatcgaaaggctttacgatcgttgataccttgcatgtagaggatagcagcgtcaagccactcgtctcgaagaatttcaataagaaagtggtggagaagatgggactggtgtatcttgttcaatactctccggaccagtttaaaagttccaacattgcgaagaaagaactcagaaaagaattgatggatctgggctttaaagtccgctatataagcgaaaattacaagatgatggcgatcgaaggtacagccactcttcaggcagtacaccctaaccaaaactggcattataatatgattaaagctccggaagcgtgggctattacgtctggatcctctagcgttaaagtagcagtcctggatacagggatcgaccataatcacccatccttggccaacttcgtgaatactaatcttggccggtcgtttgttggaggaaacaccatggatgttcaaggtcatggcacacatgttgctggcacgattgcatcttatgggagtgtaagcggagtgatgcagagtgcgacactgatcccggtcaaagtgctcgataattctggcagcgggtccctttacggtattacgcaaggcatattgtatgccgccgacatcgatgcggacgtcattaacatgtctctgggtggaggaggctataattggagcatggatgaggctgttcaaacagcagttgctcagggaaccattgtagtagcagcgactggcaatgatggtgcatcgtcgatcagttatcctgctgcctacagcagcgtcattgcggtgggatctgtgacgtccaatcgtacacgatcctcgttttctaactatggatctgggcttgaagttatggcaccgggcagcaacatctacagtacgtatcctaattccagatatacatctttgagtggtacaagcatggctactccgcacgttgcgggcgtagctgggctcattcgcgcagccaacccagacatatctgtcgcgcaagcccgtcagattctgcgggataccgcgcaagaagcaggatcgttcacacagtacggctatggaatcgtcgatgctcatgccgccgttgttgctgcatccggtggtagcggcggc

SEQ ID NO: 506 - protein, 413 aa, synthetic construct
  REGION 1..413: note = Variant of serine peptidase from Bacillus sinesaloumensis
MADQASQANGNQDVIEGELIVSVEPKNGKPDVSIQSAQSVTGQEDVLKSKGFTIVDTLHVEDSSVKPLVSKNFNKKVVEKMGLVYLVQYSPDQFKSSNIAKKELRKELMDLGFKVRYISENYKMMAIEGTATLQAVHPNQNWHYNMIKAPEAWAITSGSSSVKVAVLDTGIDHNHPSLANFVNTNLGRSFVGGNTMDVQGHGTHVAGTIASYGSVSGVMQSATLIPVKVLDNSGSGSLYGITQGILYAADIDADVINMSLGGGGYNWSMDEAVQTAVAQGTIVVAATGNDGASSISYPAAYSSVIAVGSVTSNRTRSSFSNYGSGLEVMAPGSNIYSTYPNSRYTSLSGTSMATPHVAGVAGLIRAANPDISVAQARQILRDTAQEAGSFTQYGYGIVDAHAAVVAASGGSGG

SEQ ID NO: 507 - DNA, 1239 bp, synthetic construct
  misc_feature 1..1239: note = Variant of serine peptidase from Bacillus sinesaloumensis
  source 1..1239: mol_type = other DNA
atggcagatcaagctagtcaagctaatggaaaccaggacgtcattgaaggcgagctgatcgtttcagtggaaccgaagaacggtaaacctgatgtgagcattcaaagtgcacaatccgtaacagggcaggaagacgtccttaaatcgaaaggctttacgatcgttgataccttgcatgtagaggatagcagcgtcaagccactcgtctcgaagaatttcaataagaaagtggtggagaagatgggactggtgtatcttgttcaatactctccggaccagtttaaaagttccaacattgcgaagaaagaactcagaaaagaattgatggatctgggctttaaagtccgctatataagcgaaaattacaagatgatggcgatcgaaggtacagccactcttcaggcagtacaccctaaccaaaactggcattataatatgattaaagctccggaagcgtgggctattacgtctggatcctctagcgttaaagtagcagtcctggatacagggatcgaccataatcacccatccttggccaacttcgtgaatactaatcttggccggtcgtttgttggaggaaacaccatggatgttcaaggtcatggcacacatgttgctggcacgattgcatcttatgggagtgtaagcggagtgatgcagagtgcgacactgatcccggtcaaagtgctcgataattctggcagcgggtccctttacggtattacgcaaggcatattgtatgccgccgacatcgatgcggacgtcattaacatgtctctgggtggaggaggctataatcagagcatggatgaggctgttcaaacagcagttgctatgggaaccattgtagtagcagcgactggcaatgatggtgcatcgtcgatcagttatcctgctgcctacagcagcgtcattgcggtgggatctgtgacgtccaatcgtacacgatcctcgttttctaactatggatctgggcttgaagttatggcaccgggcagcaacatctacagtacgtatcctaattccagatatacatctttgagtggtacaagcatggctactccgcacgttgcgggcgtagctgggctcattcgcgcagccaacccagacatatctgtcgcgcaagcccgtcagattctgcgggataccgcgcaagaagcaggatcgttcacacagtacggctatggaatcgtcgatgctcatgccgccgttgttgctgcatccggtggtagcggcggc

SEQ ID NO: 508 - protein, 413 aa, synthetic construct
  REGION 1..413: note = Variant of serine peptidase from Bacillus sinesaloumensis
MADQASQANGNQDVIEGELIVSVEPKNGKPDVSIQSAQSVTGQEDVLKSKGFTIVDTLHVEDSSVKPLVSKNFNKKVVEKMGLVYLVQYSPDQFKSSNIAKKELRKELMDLGFKVRYISENYKMMAIEGTATLQAVHPNQNWHYNMIKAPEAWAITSGSSSVKVAVLDTGIDHNHPSLANFVNTNLGRSFVGGNTMDVQGHGTHVAGTIASYGSVSGVMQSATLIPVKVLDNSGSGSLYGITQGILYAADIDADVINMSLGGGGYNQSMDEAVQTAVAMGTIVVAATGNDGASSISYPAAYSSVIAVGSVTSNRTRSSFSNYGSGLEVMAPGSNIYSTYPNSRYTSLSGTSMATPHVAGVAGLIRAANPDISVAQARQILRDTAQEAGSFTQYGYGIVDAHAAVVAASGGSGG

SEQ ID NO: 509 - DNA, 1239 bp, synthetic construct
  misc_feature 1..1239: note = Variant of serine peptidase from Bacillus sinesaloumensis
  source 1..1239: mol_type = other DNA
atggcagatcaagctagtcaagctaatggaaaccaggacgtcattgaaggcgagctgatcgtttcagtggaaccgaagaacggtaaacctgatgtgagcattcaaagtgcacaatccgtaacagggcaggaagacgtccttaaatcgaaaggctttacgatcgttgataccttgcatgtagaggatagcagcgtcaagccactcgtctcgaagaatttcaataagaaagtggtggagaagatgggactggtgtatcttgttcaatactctccggaccagtttaaaagttccaacattgcgaagaaagaactcagaaaagaattgatggatctgggctttaaagtccgctatataagcgaaaattacaagatgatggcgatcgaaggtacagccactcttcaggcagtacaccctaaccaaaactggcattataatatgattaaagctccggaagcgtgggctattacgtctggatcctctagcgttaaagtagcagtcctggatacagggatcgaccataatcacccatccttggccaacttcgtgaatactaatcttggccggtcgtttgttggaggaaacaccatggatgttcaaggtcatggcacacatgttgctggcacgattgcatcttatgggagtgtaagcggagtgatgcagagtgcgacactgatcccggtcaaagtgctcgataattctggcagcgggtccctttacggtattacgcaaggcatattgtatgccgccgacatcgatgcggacgtcattaacatgtctctgggtggaggaggctataatcggagcatggatgaggctgttcaaacagcagttgctcagggaaccattgtagtagcagcgactggcaatgatggtgcatcgtcgatcagttatcctgctgcctacagcagcgtcattgcggtgggatctgtgacgtccaatcgtacacgatcctcgttttctaactatggatctgggcttgaagttatggcaccgggcagcaacatctacagtacgtatcctaattccagatatacatctttgagtggtacaagcatggctactccgcacgttgcgggcgtagctgggctcattcgcgcagccaacccagacatatctgtcgcgcaagcccgtcagattctgcgggataccgcgcaagaagcaggatcgttcacacagtacggctatggaatcgtcgatgctcatgccgccgttgttgctgcatccggtggtagcggcggc

SEQ ID NO: 510 - protein, 413 aa, synthetic construct
  REGION 1..413: note = Variant of serine peptidase from Bacillus sinesaloumensis
MADQASQANGNQDVIEGELIVSVEPKNGKPDVSIQSAQSVTGQEDVLKSKGFTIVDTLHVEDSSVKPLVSKNFNKKVVEKMGLVYLVQYSPDQFKSSNIAKKELRKELMDLGFKVRYISENYKMMAIEGTATLQAVHPNQNWHYNMIKAPEAWAITSGSSSVKVAVLDTGIDHNHPSLANFVNTNLGRSFVGGNTMDVQGHGTHVAGTIASYGSVSGVMQSATLIPVKVLDNSGSGSLYGITQGILYAADIDADVINMSLGGGGYNRSMDEAVQTAVAQGTIVVAATGNDGASSISYPAAYSSVIAVGSVTSNRTRSSFSNYGSGLEVMAPGSNIYSTYPNSRYTSLSGTSMATPHVAGVAGLIRAANPDISVAQARQILRDTAQEAGSFTQYGYGIVDAHAAVVAASGGSGG

SEQ ID NO: 511 - DNA, 1239 bp, synthetic construct
  misc_feature 1..1239: note = Variant of serine peptidase from Bacillus sinesaloumensis
  source 1..1239: mol_type = other DNA
atggcagatcaagctagtcaagctaatggaaaccaggacgtcattgaaggcgagctgatcgtttcagtggaaccgaagaacggtaaacctgatgtgagcattcaaagtgcacaatccgtaacagggcaggaagacgtccttaaatcgaaaggctttacgatcgttgataccttgcatgtagaggatagcagcgtcaagccactcgtctcgaagaatttcaataagaaagtggtggagaagatgggactggtgtatcttgttcaatactctccggaccagtttaaaagttccaacattgcgaagaaagaactcagaaaagaattgatggatctgggctttaaagtccgctatataagcgaaaattacaagatgatggcgatcgaaggtacagccactcttcaggcagtacaccctaaccaaaactggcattataatatgattaaagctccggaagcgtgggctattacgtctggatcctctagcgttaaagtagcagtcctggatacagggatcgaccataatcacccatccttggccaacttcgtgaatactaatcttggccggtcgtttgttggaggaaacaccatggatgttcaaggtcatggcacacatgttgctggcacgattgcatcttatgggagtgtaagcggagtgatgcagagtgcgacactgatcccggtcaaagtgctcgataattctggcagcgggtccctttacggtattacgcaaggcatattgtatgccgccgacatcgatgcggacgtcattaacatgtctctgggtggaggaacgtataatcagagcatggatgaggctgttcaaacagcagttgctcagggaaccattgtagtagcagcgactggcaatgatggtgcatcgtcgatcagttatcctgctgcctacagcagcgtcattgcggtgggatctgtgacgtccaatcgtacacgatcctcgttttctaactatggatctgggcttgaagttatggcaccgggcagcaacatctacagtacgtatcctaattccagatatacatctttgagtggtacaagcatggctactccgcacgttgcgggcgtagctgggctcattcgcgcagccaacccagacatatctgtcgcgcaagcccgtcagattctgcgggataccgcgcaagaagcaggatcgttcacacagtacggctatggaatcgtcgatgctcatgccgccgttgttgctgcatccggtggtagcggcggc

SEQ ID NO: 512 - protein, 413 aa, synthetic construct
  REGION 1..413: note = Variant of serine peptidase from Bacillus sinesaloumensis
MADQASQANGNQDVIEGELIVSVEPKNGKPDVSIQSAQSVTGQEDVLKSKGFTIVDTLHVEDSSVKPLVSKNFNKKVVEKMGLVYLVQYSPDQFKSSNIAKKELRKELMDLGFKVRYISENYKMMAIEGTATLQAVHPNQNWHYNMIKAPEAWAITSGSSSVKVAVLDTGIDHNHPSLANFVNTNLGRSFVGGNTMDVQGHGTHVAGTIASYGSVSGVMQSATLIPVKVLDNSGSGSLYGITQGILYAADIDADVINMSLGGGTYNQSMDEAVQTAVAQGTIVVAATGNDGASSISYPAAYSSVIAVGSVTSNRTRSSFSNYGSGLEVMAPGSNIYSTYPNSRYTSLSGTSMATPHVAGVAGLIRAANPDISVAQARQILRDTAQEAGSFTQYGYGIVDAHAAVVAASGGSGG

SEQ ID NO: 513 - DNA, 1239 bp, synthetic construct
  misc_feature 1..1239: note = Variant of serine peptidase from Bacillus sinesaloumensis
  source 1..1239: mol_type = other DNA
atggcagatcaagctagtcaagctaatggaaaccaggacgtcattgaaggcgagctgatcgtttcagtggaaccgaagaacggtaaacctgatgtgagcattcaaagtgcacaatccgtaacagggcaggaagacgtccttaaatcgaaaggctttacgatcgttgataccttgcatgtagaggatagcagcgtcaagccactcgtctcgaagaatttcaataagaaagtggtggagaagatgggactggtgtatcttgttcaatactctccggaccagtttaaaagttccaacattgcgaagaaagaactcagaaaagaattgatggatctgggctttaaagtccgctatataagcgaaaattacaagatgatggcgatcgaaggtacagccactcttcaggcagtacaccctaaccaaaactggcattataatatgattaaagctccggaagcgtgggctattacgtctggatcctctagcgttaaagtagcagtcctggatacagggatcgaccataatcacccatccttggccaacttcgtgaatactaatcttggccggtcgtttgttggaggaaacaccatggatgttcaaggtcatggcacacatgttgctggcacgattgcatcttatgggagtgtaagcggagtgatgcagagtgcgacactgatcccggtcaaagtgctcgataattctggcagcgggtccctttacggtattacgcaaggcatattgtatgccgccgacatcgatgcggacgtcattaacatgtctctgggtggaggaggctataatcagagcatggatgaggctgttcaaacagcagttgctctgggaaccattgtagtagcagcgactggcaatgatggtgcatcgtcgatcagttatcctgctgcctacagcagcgtcattgcggtgggatctgtgacgtccaatcgtacacgatcctcgttttctaactatggatctgggcttgaagttatggcaccgggcagcaacatctacagtacgtatcctaattccagatatacatctttgagtggtacaagcatggctactccgcacgttgcgggcgtagctgggctcattcgcgcagccaacccagacatatctgtcgcgcaagcccgtcagattctgcgggataccgcgcaagaagcaggatcgttcacacagtacggctatggaatcgtcgatgctcatgccgccgttgttgctgcatccggtggtagcggcggc

SEQ ID NO: 514 - protein, 413 aa, synthetic construct
  REGION 1..413: note = Variant of serine peptidase from Bacillus sinesaloumensis
MADQASQANGNQDVIEGELIVSVEPKNGKPDVSIQSAQSVTGQEDVLKSKGFTIVDTLHVEDSSVKPLVSKNFNKKVVEKMGLVYLVQYSPDQFKSSNIAKKELRKELMDLGFKVRYISENYKMMAIEGTATLQAVHPNQNWHYNMIKAPEAWAITSGSSSVKVAVLDTGIDHNHPSLANFVNTNLGRSFVGGNTMDVQGHGTHVAGTIASYGSVSGVMQSATLIPVKVLDNSGSGSLYGITQGILYAADIDADVINMSLGGGGYNQSMDEAVQTAVALGTIVVAATGNDGASSISYPAAYSSVIAVGSVTSNRTRSSFSNYGSGLEVMAPGSNIYSTYPNSRYTSLSGTSMATPHVAGVAGLIRAANPDISVAQARQILRDTAQEAGSFTQYGYGIVDAHAAVVAASGGSGG

SEQ ID NO: 515 - DNA, 1239 bp, synthetic construct
  misc_feature 1..1239: note = Variant of serine peptidase from Bacillus sinesaloumensis
  source 1..1239: mol_type = other DNA
atggcagatcaagctagtcaagctaatggaaaccaggacgtcattgaaggcgagctgatcgtttcagtggaaccgaagaacggtaaacctgatgtgagcattcaaagtgcacaatccgtaacagggcaggaagacgtccttaaatcgaaaggctttacgatcgttgataccttgcatgtagaggatagcagcgtcaagccactcgtctcgaagaatttcaataagaaagtggtggagaagatgggactggtgtatcttgttcaatactctccggaccagtttaaaagttccaacattgcgaagaaagaactcagaaaagaattgatggatctgggctttaaagtccgctatataagcgaaaattacaagatgatggcgatcgaaggtacagccactcttcaggcagtacaccctaaccaaaactggcattataatatgattaaagctccggaagcgtgggctattacgtctggatcctctagcgttaaagtagcagtcctggatacagggatcgaccataatcacccatccttggccaacttcgtgaatactaatcttggccggtcgtttgttggaggaaacaccatggatgttcaaggtcatggcacacatgttgctggcacgattgcatcttatgggagtgtaagcggagtgatgcagagtgcgacactgatcccggtcaaagtgctcgataattctggcagcgggtccctttacggtattacgcaaggcatattgtatgccgccgacatcgatgcggacgtcattaacatgtctctgggtggacgtggctataatcagagcatggatgaggctgttcaaacagcagttgctcagggaaccattgtagtagcagcgactggcaatgatggtgcatcgtcgatcagttatcctgctgcctacagcagcgtcattgcggtgggatctgtgacgtccaatcgtacacgatcctcgttttctaactatggatctgggcttgaagttatggcaccgggcagcaacatctacagtacgtatcctaattccagatatacatctttgagtggtacaagcatggctactccgcacgttgcgggcgtagctgggctcattcgcgcagccaacccagacatatctgtcgcgcaagcccgtcagattctgcgggataccgcgcaagaagcaggatcgttcacacagtacggctatggaatcgtcgatgctcatgccgccgttgttgctgcatccggtggtagcggcggc

SEQ ID NO: 516 - protein, 413 aa, synthetic construct
  REGION 1..413: note = Variant of serine peptidase from Bacillus sinesaloumensis
MADQASQANGNQDVIEGELIVSVEPKNGKPDVSIQSAQSVTGQEDVLKSKGFTIVDTLHVEDSSVKPLVSKNFNKKVVEKMGLVYLVQYSPDQFKSSNIAKKELRKELMDLGFKVRYISENYKMMAIEGTATLQAVHPNQNWHYNMIKAPEAWAITSGSSSVKVAVLDTGIDHNHPSLANFVNTNLGRSFVGGNTMDVQGHGTHVAGTIASYGSVSGVMQSATLIPVKVLDNSGSGSLYGITQGILYAADIDADVINMSLGGRGYNQSMDEAVQTAVAQGTIVVAATGNDGASSISYPAAYSSVIAVGSVTSNRTRSSFSNYGSGLEVMAPGSNIYSTYPNSRYTSLSGTSMATPHVAGVAGLIRAANPDISVAQARQILRDTAQEAGSFTQYGYGIVDAHAAVVAASGGSGG

SEQ ID NO: 517 - DNA, 1239 bp, synthetic construct
  misc_feature 1..1239: note = Variant of serine peptidase from Bacillus sinesaloumensis
  source 1..1239: mol_type = other DNA
atggcagatcaagctagtcaagctaatggaaaccaggacgtcattgaaggcgagctgatcgtttcagtggaaccgaagaacggtaaacctgatgtgagcattcaaagtgcacaatccgtaacagggcaggaagacgtccttaaatcgaaaggctttacgatcgttgataccttgcatgtagaggatagcagcgtcaagccactcgtctcgaagaatttcaataagaaagtggtggagaagatgggactggtgtatcttgttcaatactctccggaccagtttaaaagttccaacattgcgaagaaagaactcagaaaagaattgatggatctgggctttaaagtccgctatataagcgaaaattacaagatgatggcgatcgaaggtacagccactcttcaggcatgtcaccctaaccaaaactggcattataatatgattaaagctccggaagcgtgggctattacgtctggatcctctagcgttaaagtagcagtcctggatacagggatcgaccataatcacccatccttggccaacttcgtgaatactaatcttggccggtcgtttgttggaggaaacaccatggatgttcaaggtcatggcacacatgttgctggcacgattgcatcttatgggagtgtaagcggagtgatgcagagtgcgacactgatcccggtcaaagtgctcgataattctggcagcgggtccctttacggtattacgcaaggcatattgtatgccgccgacatcgatgcggacgtcattaacatgtctctgggtggaggaggctataatcagagcatggatgaggctgttcaaacagcagttgctcagggaaccattgtagtagcagcgactggcaatgatggtgcatcgtcgatcagttatcctgctgcctacagcagcgtcattgcggtgggatctgtgacgtccaatcgtacacgatcctcgttttctaactatggatctgggcttgaagttatggcaccgggcagcaacatctacagtacgtatcctaattccagatatacatctttgagtggtacaagcatggctactccgcacgttgcgggcgtagctgggctcattcgcgcagccaacccagacatatctgtcgcgcaagcccgtcagattctgcgggataccgcgcaagaagcaggatcgttcacacagtacggctatggaatcgtcgatgctcatgccgccgttgttgctgcatccggtggtagcggcggc

SEQ ID NO: 518 - protein, 413 aa, synthetic construct
  REGION 1..413: note = Variant of serine peptidase from Bacillus sinesaloumensis
MADQASQANGNQDVIEGELIVSVEPKNGKPDVSIQSAQSVTGQEDVLKSKGFTIVDTLHVEDSSVKPLVSKNFNKKVVEKMGLVYLVQYSPDQFKSSNIAKKELRKELMDLGFKVRYISENYKMMAIEGTATLQACHPNQNWHYNMIKAPEAWAITSGSSSVKVAVLDTGIDHNHPSLANFVNTNLGRSFVGGNTMDVQGHGTHVAGTIASYGSVSGVMQSATLIPVKVLDNSGSGSLYGITQGILYAADIDADVINMSLGGGGYNQSMDEAVQTAVAQGTIVVAATGNDGASSISYPAAYSSVIAVGSVTSNRTRSSFSNYGSGLEVMAPGSNIYSTYPNSRYTSLSGTSMATPHVAGVAGLIRAANPDISVAQARQILRDTAQEAGSFTQYGYGIVDAHAAVVAASGGSGG

SEQ ID NO: 519 - DNA, 1239 bp, synthetic construct
  misc_feature 1..1239: note = Variant of serine peptidase from Bacillus sinesaloumensis
  source 1..1239: mol_type = other DNA
atggcagatcaagctagtcaagctaatggaaaccaggacgtcattgaaggcgagctgatcgtttcagtggaaccgaagaacggtaaacctgatgtgagcattcaaagtgcacaatccgtaacagggcaggaagacgtccttaaatcgaaaggctttacgatcgttgataccttgcatgtagaggatagcagcgtcaagccactcgtctcgaagaatttcaataagaaagtggtggagaagatgggactggtgtatcttgttcaatactctccggaccagtttaaaagttccaacattgcgaagaaagaactcagaaaagaattgatggatctgggctttaaagtccgctatataagcgaaaattacaagatgatggcgatcgaaggtacagccactcttcaggcagtacaccctaaccaaaactggcattatgagatgattaaagctccggaagcgtgggctattacgtctggatcctctagcgttaaagtagcagtcctggatacagggatcgaccataatcacccatccttggccaacttcgtgaatactaatcttggccggtcgtttgttggaggaaacaccatggatgttcaaggtcatggcacacatgttgctggcacgattgcatcttatgggagtgtaagcggagtgatgcagagtgcgacactgatcccggtcaaagtgctcgataattctggcagcgggtccctttacggtattacgcaaggcatattgtatgccgccgacatcgatgcggacgtcattaacatgtctctgggtggaggaggctataatcagagcatggatgaggctgttcaaacagcagttgctcagggaaccattgtagtagcagcgactggcaatgatggtgcatcgtcgatcagttatcctgctgcctacagcagcgtcattgcggtgggatctgtgacgtccaatcgtacacgatcctcgttttctaactatggatctgggcttgaagttatggcaccgggcagcaacatctacagtacgtatcctaattccagatatacatctttgagtggtacaagcatggctactccgcacgttgcgggcgtagctgggctcattcgcgcagccaacccagacatatctgtcgcgcaagcccgtcagattctgcgggataccgcgcaagaagcaggatcgttcacacagtacggctatggaatcgtcgatgctcatgccgccgttgttgctgcatccggtggtagcggcggc

SEQ ID NO: 520 - protein, 413 aa, synthetic construct
  REGION 1..413: note = Variant of serine peptidase from Bacillus sinesaloumensis
MADQASQANGNQDVIEGELIVSVEPKNGKPDVSIQSAQSVTGQEDVLKSKGFTIVDTLHVEDSSVKPLVSKNFNKKVVEKMGLVYLVQYSPDQFKSSNIAKKELRKELMDLGFKVRYISENYKMMAIEGTATLQAVHPNQNWHYEMIKAPEAWAITSGSSSVKVAVLDTGIDHNHPSLANFVNTNLGRSFVGGNTMDVQGHGTHVAGTIASYGSVSGVMQSATLIPVKVLDNSGSGSLYGITQGILYAADIDADVINMSLGGGGYNQSMDEAVQTAVAQGTIVVAATGNDGASSISYPAAYSSVIAVGSVTSNRTRSSFSNYGSGLEVMAPGSNIYSTYPNSRYTSLSGTSMATPHVAGVAGLIRAANPDISVAQARQILRDTAQEAGSFTQYGYGIVDAHAAVVAASGGSGG

SEQ ID NO: 521 - DNA, 1239 bp, synthetic construct
  misc_feature 1..1239: note = Variant of serine peptidase from Bacillus sinesaloumensis
  source 1..1239: mol_type = other DNA
atggcagatcaagctagtcaagctaatggaaaccaggacgtcattgaaggcgagctgatcgtttcagtggaaccgaagaacggtaaacctgatgtgagcattcaaagtgcacaatccgtaacagggcaggaagacgtccttaaatcgaaaggctttacgatcgttgataccttgcatgtagaggatagcagcgtcaagccactcgtctcgaagaatttcaataagaaagtggtggagaagatgggactggtgtatcttgttcaatactctccggaccagtttaaaagttccaacattgcgaagaaagaactcagaaaagaattgatggatctgggctttaaagtccgctatataagcgaaaattacaagatgatggcgatcgaaggtacagccactcttcaggcagtacaccctaaccaaaactggcattataatatgattaaagctccggaagcgtgggctattacgtctggatcctctagcgttaaagtagcagtcctggatacagggatcgaccataatcacccatccttggccaacttcgtgaatactaatcttggcgggtcgtttgttggaggaaacaccatggatgttcaaggtcatggcacacatgttgctggcacgattgcatcttatgggagtgtaagcggagtgatgcagagtgcgacactgatcccggtcaaagtgctcgataattctggcagcgggtccctttacggtattacgcaaggcatattgtatgccgccgacatcgatgcggacgtcattaacatgtctctgggtggaggaggctataatcagagcatggatgaggctgttcaaacagcagttgctcagggaaccattgtagtagcagcgactggcaatgatggtgcatcgtcgatcagttatcctgctgcctacagcagcgtcattgcggtgggatctgtgacgtccaatcgtacacgatcctcgttttctaactatggatctgggcttgaagttatggcaccgggcagcaacatctacagtacgtatcctaattccagatatacatctttgagtggtacaagcatggctactccgcacgttgcgggcgtagctgggctcattcgcgcagccaacccagacatatctgtcgcgcaagcccgtcagattctgcgggataccgcgcaagaagcaggatcgttcacacagtacggctatggaatcgtcgatgctcatgccgccgttgttgctgcatccggtggtagcggcggc

SEQ ID NO: 522 - protein, 413 aa, synthetic construct
  REGION 1..413: note = Variant of serine peptidase from Bacillus sinesaloumensis
MADQASQANGNQDVIEGELIVSVEPKNGKPDVSIQSAQSVTGQEDVLKSKGFTIVDTLHVEDSSVKPLVSKNFNKKVVEKMGLVYLVQYSPDQFKSSNIAKKELRKELMDLGFKVRYISENYKMMAIEGTATLQAVHPNQNWHYNMIKAPEAWAITSGSSSVKVAVLDTGIDHNHPSLANFVNTNLGGSFVGGNTMDVQGHGTHVAGTIASYGSVSGVMQSATLIPVKVLDNSGSGSLYGITQGILYAADIDADVINMSLGGGGYNQSMDEAVQTAVAQGTIVVAATGNDGASSISYPAAYSSVIAVGSVTSNRTRSSFSNYGSGLEVMAPGSNIYSTYPNSRYTSLSGTSMATPHVAGVAGLIRAANPDISVAQARQILRDTAQEAGSFTQYGYGIVDAHAAVVAASGGSGG

SEQ ID NO: 523 - DNA, 1239 bp, synthetic construct
  misc_feature 1..1239: note = Variant of serine peptidase from Bacillus sinesaloumensis
  source 1..1239: mol_type = other DNA
atggcagatcaagctagtcaagctaatggaaaccaggacgtcattgaaggcgagctgatcgtttcagtggaaccgaagaacggtaaacctgatgtgagcattcaaagtgcacaatccgtaacagggcaggaagacgtccttaaatcgaaaggctttacgatcgttgataccttgcatgtagaggatagcagcgtcaagccactcgtctcgaagaatttcaataagaaagtggtggagaagatgggactggtgtatcttgttcaatactctccggaccagtttaaaagttccaacattgcgaagaaagaactcagaaaagaattgatggatctgggctttaaagtccgctatataagcgaaaattacaagatgatggcgatcgaaggtgcggccactcttcaggcagtacaccctaaccaaaactggcattataatatgattaaagctccggaagcgtgggctattacgtctggatcctctagcgttaaagtagcagtcctggatacagggatcgaccataatcacccatccttggccaacttcgtgaatactaatcttggccggtcgtttgttggaggaaacaccatggatgttcaaggtcatggcacacatgttgctggcacgattgcatcttatgggagtgtaagcggagtgatgcagagtgcgacactgatcccggtcaaagtgctcgataattctggcagcgggtccctttacggtattacgcaaggcatattgtatgccgccgacatcgatgcggacgtcattaacatgtctctgggtggaggaggctataatcagagcatggatgaggctgttcaaacagcagttgctcagggaaccattgtagtagcagcgactggcaatgatggtgcatcgtcgatcagttatcctgctgcctacagcagcgtcattgcggtgggatctgtgacgtccaatcgtacacgatcctcgttttctaactatggatctgggcttgaagttatggcaccgggcagcaacatctacagtacgtatcctaattccagatatacatctttgagtggtacaagcatggctactccgcacgttgcgggcgtagctgggctcattcgcgcagccaacccagacatatctgtcgcgcaagcccgtcagattctgcgggataccgcgcaagaagcaggatcgttcacacagtacggctatggaatcgtcgatgctcatgccgccgttgttgctgcatccggtggtagcggcggc

SEQ ID NO: 524 - protein, 413 aa, synthetic construct
  REGION 1..413: note = Variant of serine peptidase from Bacillus sinesaloumensis
MADQASQANGNQDVIEGELIVSVEPKNGKPDVSIQSAQSVTGQEDVLKSKGFTIVDTLHVEDSSVKPLVSKNFNKKVVEKMGLVYLVQYSPDQFKSSNIAKKELRKELMDLGFKVRYISENYKMMAIEGAATLQAVHPNQNWHYNMIKAPEAWAITSGSSSVKVAVLDTGIDHNHPSLANFVNTNLGRSFVGGNTMDVQGHGTHVAGTIASYGSVSGVMQSATLIPVKVLDNSGSGSLYGITQGILYAADIDADVINMSLGGGGYNQSMDEAVQTAVAQGTIVVAATGNDGASSISYPAAYSSVIAVGSVTSNRTRSSFSNYGSGLEVMAPGSNIYSTYPNSRYTSLSGTSMATPHVAGVAGLIRAANPDISVAQARQILRDTAQEAGSFTQYGYGIVDAHAAVVAASGGSGG

SEQ ID NO: 525 - DNA, 1239 bp, synthetic construct
  misc_feature 1..1239: note = Variant of serine peptidase from Bacillus sinesaloumensis
  source 1..1239: mol_type = other DNA
atggcagatcaagctagtcaagctaatggaaaccaggacgtcattgaaggcgagctgatcgtttcagtggaaccgaagaacggtaaacctgatgtgagcattcaaagtgcacaatccgtaacagggcaggaagacgtccttaaatcgaaaggctttacgatcgttgataccttgcatgtagaggatagcagcgtcaagccactcgtctcgaagaatttcaataagaaagtggtggagaagatgggactggtgtatcttgttcaatactctccggaccagtttaaaagttccaacattgcgaagaaagaactcagaaaagaattgatggatctgggctttaaagtccgctatataagcgaaaattacaagatgatggcgatcgaaggtacagccactcttcaggcagtacaccctaaccaaaactggcattataatatgattaaagctccggaagcgtgggctattacgtctggatcctctagcgttaaagtagcagtcctggatacagggatcgaccataatcacccatccttggccaacttcgtgaatactaatcttggccggtcgtttgttaatggaaacaccatggatgttcaaggtcatggcacacatgttgctggcacgattgcatcttatgggagtgtaagcggagtgatgcagagtgcgacactgatcccggtcaaagtgctcgataattctggcagcgggtccctttacggtattacgcaaggcatattgtatgccgccgacatcgatgcggacgtcattaacatgtctctgggtggaggaggctataatcagagcatggatgaggctgttcaaacagcagttgctcagggaaccattgtagtagcagcgactggcaatgatggtgcatcgtcgatcagttatcctgctgcctacagcagcgtcattgcggtgggatctgtgacgtccaatcgtacacgatcctcgttttctaactatggatctgggcttgaagttatggcaccgggcagcaacatctacagtacgtatcctaattccagatatacatctttgagtggtacaagcatggctactccgcacgttgcgggcgtagctgggctcattcgcgcagccaacccagacatatctgtcgcgcaagcccgtcagattctgcgggataccgcgcaagaagcaggatcgttcacacagtacggctatggaatcgtcgatgctcatgccgccgttgttgctgcatccggtggtagcggcggc

SEQ ID NO: 526 - protein, 413 aa, synthetic construct
  REGION 1..413: note = Variant of serine peptidase from Bacillus sinesaloumensis
MADQASQANGNQDVIEGELIVSVEPKNGKPDVSIQSAQSVTGQEDVLKSKGFTIVDTLHVEDSSVKPLVSKNFNKKVVEKMGLVYLVQYSPDQFKSSNIAKKELRKELMDLGFKVRYISENYKMMAIEGTATLQAVHPNQNWHYNMIKAPEAWAITSGSSSVKVAVLDTGIDHNHPSLANFVNTNLGRSFVNGNTMDVQGHGTHVAGTIASYGSVSGVMQSATLIPVKVLDNSGSGSLYGITQGILYAADIDADVINMSLGGGGYNQSMDEAVQTAVAQGTIVVAATGNDGASSISYPAAYSSVIAVGSVTSNRTRSSFSNYGSGLEVMAPGSNIYSTYPNSRYTSLSGTSMATPHVAGVAGLIRAANPDISVAQARQILRDTAQEAGSFTQYGYGIVDAHAAVVAASGGSGG

SEQ ID NO: 527 - DNA, 1239 bp, synthetic construct
  misc_feature 1..1239: note = Variant of serine peptidase from Bacillus sinesaloumensis
  source 1..1239: mol_type = other DNA
atggcagatcaagctagtcaagctaatggaaaccaggacgtcattgaaggcgagctgatcgtttcagtggaaccgaagaacggtaaacctgatgtgagcattcaaagtgcacaatccgtaacagggcaggaagacgtccttaaatcgaaaggctttacgatcgttgataccttgcatgtagaggatagcagcgtcaagccactcgtctcgaagaatttcaataagaaagtggtggagaagatgggactggtgtatcttgttcaatactctccggaccagtttaaaagttccaacattgcgaagaaagaactcagaaaagaattgatggatctgggctttaaagtccgctatataagcgaaaattacaagatgatggcgatcgaaggtacagccactcttcaggcagtacaccctaaccaaaactggcattataatatgattaaagctccggaagcgtgggctattacgtctggatcctctagcgttaaagtagcagtcctggatacagggatcgaccataatcacccatccttggccaacttcgtgaatactaatcttggcctttcgtttgttggaggaaacaccatggatgttcaaggtcatggcacacatgttgctggcacgattgcatcttatgggagtgtaagcggagtgatgcagagtgcgacactgatcccggtcaaagtgctcgataattctggcagcgggtccctttacggtattacgcaaggcatattgtatgccgccgacatcgatgcggacgtcattaacatgtctctgggtggaggaggctataatcagagcatggatgaggctgttcaaacagcagttgctcagggaaccattgtagtagcagcgactggcaatgatggtgcatcgtcgatcagttatcctgctgcctacagcagcgtcattgcggtgggatctgtgacgtccaatcgtacacgatcctcgttttctaactatggatctgggcttgaagttatggcaccgggcagcaacatctacagtacgtatcctaattccagatatacatctttgagtggtacaagcatggctactccgcacgttgcgggcgtagctgggctcattcgcgcagccaacccagacatatctgtcgcgcaagcccgtcagattctgcgggataccgcgcaagaagcaggatcgttcacacagtacggctatggaatcgtcgatgctcatgccgccgttgttgctgcatccggtggtagcggcggc

SEQ ID NO: 528 - protein, 413 aa, synthetic construct
  REGION 1..413: note = Variant of serine peptidase from Bacillus sinesaloumensis
MADQASQANGNQDVIEGELIVSVEPKNGKPDVSIQSAQSVTGQEDVLKSKGFTIVDTLHVEDSSVKPLVSKNFNKKVVEKMGLVYLVQYSPDQFKSSNIAKKELRKELMDLGFKVRYISENYKMMAIEGTATLQAVHPNQNWHYNMIKAPEAWAITSGSSSVKVAVLDTGIDHNHPSLANFVNTNLGLSFVGGNTMDVQGHGTHVAGTIASYGSVSGVMQSATLIPVKVLDNSGSGSLYGITQGILYAADIDADVINMSLGGGGYNQSMDEAVQTAVAQGTIVVAATGNDGASSISYPAAYSSVIAVGSVTSNRTRSSFSNYGSGLEVMAPGSNIYSTYPNSRYTSLSGTSMATPHVAGVAGLIRAANPDISVAQARQILRDTAQEAGSFTQYGYGIVDAHAAVVAASGGSGG

SEQ ID NO: 529 - DNA, 1239 bp, synthetic construct
  misc_feature 1..1239: note = Variant of serine peptidase from Bacillus sinesaloumensis
  source 1..1239: mol_type = other DNA
atggcagatcaagctagtcaagctaatggaaaccaggacgtcattgaaggcgagctgatcgtttcagtggaaccgaagaacggtaaacctgatgtgagcattcaaagtgcacaatccgtaacagggcaggaagacgtccttaaatcgaaaggctttacgatcgttgataccttgcatgtagaggatagcagcgtcaagccactcgtctcgaagaatttcaataagaaagtggtggagaagatgggactggtgtatcttgttcaatactctccggaccagtttaaaagttccaacattgcgaagaaagaactcagaaaagaattgatggatctgggctttaaagtccgctatataagcgaaaattacaagatgatggcgatcgaaggtacagccactcttcaggcagtacaccctaaccaaaactggcattataatatgattaaagctccggaagcgtgggctattacgtctggatcctctagcgttaaagtagcagtcctggatacagggatcgaccataatcacccatccttggccaacttcgtgaatactaatcttggccggtcgtttgttggaggaaacaccatggatgttcaaggtcatggcacacatgttgctggcacgattgcatcttatgggagtgtaagcggagtgatgcagagtgcgacactgatcccggtcaaagtgctcgataattctggcagcgggtccctttacggtattacgcaaggcatattgtatgccgccgacatcgatgcggacgtcattaacatgtctctgggtggaggaggctataatcagagcatggatgaggctgttcaaacagcagttgctcagggaaccattgtagtagcagcgactggcaatgatggtgcatcgtcgatcagttatcctgctgcctacagcagcgtcattgcggtgggatctgtgacgattaatcgtacacgatcctcgttttctaactatggatctgggcttgaagttatggcaccgggcagcaacatctacagtacgtatcctaattccagatatacatctttgagtggtacaagcatggctactccgcacgttgcgggcgtagctgggctcattcgcgcagccaacccagacatatctgtcgcgcaagcccgtcagattctgcgggataccgcgcaagaagcaggatcgttcacacagtacggctatggaatcgtcgatgctcatgccgccgttgttgctgcatccggtggtagcggcggc

SEQ ID NO: 530 - protein, 413 aa, synthetic construct
  REGION 1..413: note = Variant of serine peptidase from Bacillus sinesaloumensis
MADQASQANGNQDVIEGELIVSVEPKNGKPDVSIQSAQSVTGQEDVLKSKGFTIVDTLHVEDSSVKPLVSKNFNKKVVEKMGLVYLVQYSPDQFKSSNIAKKELRKELMDLGFKVRYISENYKMMAIEGTATLQAVHPNQNWHYNMIKAPEAWAITSGSSSVKVAVLDTGIDHNHPSLANFVNTNLGRSFVGGNTMDVQGHGTHVAGTIASYGSVSGVMQSATLIPVKVLDNSGSGSLYGITQGILYAADIDADVINMSLGGGGYNQSMDEAVQTAVAQGTIVVAATGNDGASSISYPAAYSSVIAVGSVTINRTRSSFSNYGSGLEVMAPGSNIYSTYPNSRYTSLSGTSMATPHVAGVAGLIRAANPDISVAQARQILRDTAQEAGSFTQYGYGIVDAHAAVVAASGGSGG

SEQ ID NO: 531 - DNA, 1239 bp, synthetic construct
  misc_feature 1..1239: note = Variant of serine peptidase from Bacillus sinesaloumensis
  source 1..1239: mol_type = other DNA
atggcagatcaagctagtcaagctaatggaaaccaggacgtcattgaaggcgagctgatcgtttcagtggaaccgaagaacggtaaacctgatgtgagcattcaaagtgcacaatccgtaacagggcaggaagacgtccttaaatcgaaaggctttacgatcgttgataccttgcatgtagaggatagcagcgtcaagccactcgtctcgaagaatttcaataagaaagtggtggagaagatgggactggtgtatcttgttcaatactctccggaccagtttaaaagttccaacattgcgaagaaagaactcagaaaagaattgatggatctgggctttaaagtccgctatataagcgaaaattacaagatgatggcgatcgaagagacagccactcttcaggcagtacaccctaaccaaaactggcattataatatgattaaagctccggaagcgtgggctattacgtctggatcctctagcgttaaagtagcagtcctggatacagggatcgaccataatcacccatccttggccaacttcgtgaatactaatcttggccggtcgtttgttggaggaaacaccatggatgttcaaggtcatggcacacatgttgctggcacgattgcatcttatgggagtgtaagcggagtgatgcagagtgcgacactgatcccggtcaaagtgctcgataattctggcagcgggtccctttacggtattacgcaaggcatattgtatgccgccgacatcgatgcggacgtcattaacatgtctctgggtggaggaggctataatcagagcatggatgaggctgttcaaacagcagttgctcagggaaccattgtagtagcagcgactggcaatgatggtgcatcgtcgatcagttatcctgctgcctacagcagcgtcattgcggtgggatctgtgacgtccaatcgtacacgatcctcgttttctaactatggatctgggcttgaagttatggcaccgggcagcaacatctacagtacgtatcctaattccagatatacatctttgagtggtacaagcatggctactccgcacgttgcgggcgtagctgggctcattcgcgcagccaacccagacatatctgtcgcgcaagcccgtcagattctgcgggataccgcgcaagaagcaggatcgttcacacagtacggctatggaatcgtcgatgctcatgccgccgttgttgctgcatccggtggtagcggcggc

SEQ ID NO: 532 - protein, 413 aa, synthetic construct
  REGION 1..413: note = Variant of serine peptidase from Bacillus sinesaloumensis
MADQASQANGNQDVIEGELIVSVEPKNGKPDVSIQSAQSVTGQEDVLKSKGFTIVDTLHVEDSSVKPLVSKNFNKKVVEKMGLVYLVQYSPDQFKSSNIAKKELRKELMDLGFKVRYISENYKMMAIEETATLQAVHPNQNWHYNMIKAPEAWAITSGSSSVKVAVLDTGIDHNHPSLANFVNTNLGRSFVGGNTMDVQGHGTHVAGTIASYGSVSGVMQSATLIPVKVLDNSGSGSLYGITQGILYAADIDADVINMSLGGGGYNQSMDEAVQTAVAQGTIVVAATGNDGASSISYPAAYSSVIAVGSVTSNRTRSSFSNYGSGLEVMAPGSNIYSTYPNSRYTSLSGTSMATPHVAGVAGLIRAANPDISVAQARQILRDTAQEAGSFTQYGYGIVDAHAAVVAASGGSGG

SEQ ID NO: 533 - DNA, 1239 bp, synthetic construct
  misc_feature 1..1239: note = Variant of serine peptidase from Bacillus sinesaloumensis
  source 1..1239: mol_type = other DNA
atggcagatcaagctagtcaagctaatggaaaccaggacgtcattgaaggcgagctgatcgtttcagtggaaccgaagaacggtaaacctgatgtgagcattcaaagtgcacaatccgtaacagggcaggaagacgtccttaaatcgaaaggctttacgatcgttgataccttgcatgtagaggatagcagcgtcaagccactcgtctcgaagaatttcaataagaaagtggtggagaagatgggactggtgtatcttgttcaatactctccggaccagtttaaaagttccaacattgcgaagaaagaactcagaaaagaattgatggatctgggctttaaagtccgctatataagcgaaaattacaagatgatggcgatcgaaggtacagccactcttcaggcagtacaccctaaccaaaactggcattataatatgattaaagctccggaagcgtgggctattacgtctggatcctctagcgttaaagtagcagtcctggatacagggatcgaccataatcacccatccttggccaacttcgtgaatactaatcttggccggtcgtttgttggaggaaacaccatggatgttcaaggtcatggcacacatgttgctggcacgattgcatcttatgggagtgtaagcggagtgatgcagagtgcgacactgatcccggtcaaagtgctcgataattctggcagcgggtccctttacggtattacgcaaggcatattgtatgccgccgacatcgatgcggacgtcattaacatgtctctgggtggaggaggctataatcagagcatggatgaggctgttcaaacagcagttgctcagggaaccattgtagtagcagcgactggcaatgatggtgcatcgtcgatcagttatcctgctgcctacagcagcgtcattgcggtgggatctgtgacgtccaatcgtgagcgatcctcgttttctaactatggatctgggcttgaagttatggcaccgggcagcaacatctacagtacgtatcctaattccagatatacatctttgagtggtacaagcatggctactccgcacgttgcgggcgtagctgggctcattcgcgcagccaacccagacatatctgtcgcgcaagcccgtcagattctgcgggataccgcgcaagaagcaggatcgttcacacagtacggctatggaatcgtcgatgctcatgccgccgttgttgctgcatccggtggtagcggcggc

SEQ ID NO: 534 - protein, 413 aa, synthetic construct
  REGION 1..413: note = Variant of serine peptidase from Bacillus sinesaloumensis
MADQASQANGNQDVIEGELIVSVEPKNGKPDVSIQSAQSVTGQEDVLKSKGFTIVDTLHVEDSSVKPLVSKNFNKKVVEKMGLVYLVQYSPDQFKSSNIAKKELRKELMDLGFKVRYISENYKMMAIEGTATLQAVHPNQNWHYNMIKAPEAWAITSGSSSVKVAVLDTGIDHNHPSLANFVNTNLGRSFVGGNTMDVQGHGTHVAGTIASYGSVSGVMQSATLIPVKVLDNSGSGSLYGITQGILYAADIDADVINMSLGGGGYNQSMDEAVQTAVAQGTIVVAATGNDGASSISYPAAYSSVIAVGSVTSNRERSSFSNYGSGLEVMAPGSNIYSTYPNSRYTSLSGTSMATPHVAGVAGLIRAANPDISVAQARQILRDTAQEAGSFTQYGYGIVDAHAAVVAASGGSGG

SEQ ID NO: 535 - DNA, 1239 bp, synthetic construct
  misc_feature 1..1239: note = Variant of serine peptidase from Bacillus sinesaloumensis
  source 1..1239: mol_type = other DNA
atggcagatcaagctagtcaagctaatggaaaccaggacgtcattgaaggcgagctgatcgtttcagtggaaccgaagaacggtaaacctgatgtgagcattcaaagtgcacaatccgtaacagggcaggaagacgtccttaaatcgaaaggctttacgatcgttgataccttgcatgtagaggatagcagcgtcaagccactcgtctcgaagaatttcaataagaaagtggtggagaagatgggactggtgtatcttgttcaatactctccggaccagtttaaaagttccaacattgcgaagaaagaactcagaaaagaattgatggatctgggctttaaagtccgctatataagcgaaaattacaagatgatggcgatcgaaggtacagccactcttcaggcagtacaccctaaccaaaactggcattatgctatgattaaagctccggaagcgtgggctattacgtctggatcctctagcgttaaagtagcagtcctggatacagggatcgaccataatcacccatccttggccaacttcgtgaatactaatcttggccggtcgtttgttggaggaaacaccatggatgttcaaggtcatggcacacatgttgctggcacgattgcatcttatgggagtgtaagcggagtgatgcagagtgcgacactgatcccggtcaaagtgctcgataattctggcagcgggtccctttacggtattacgcaaggcatattgtatgccgccgacatcgatgcggacgtcattaacatgtctctgggtggaggaggctataatcagagcatggatgaggctgttcaaacagcagttgctcagggaaccattgtagtagcagcgactggcaatgatggtgcatcgtcgatcagttatcctgctgcctacagcagcgtcattgcggtgggatctgtgacgtccaatcgtacacgatcctcgttttctaactatggatctgggcttgaagttatggcaccgggcagcaacatctacagtacgtatcctaattccagatatacatctttgagtggtacaagcatggctactccgcacgttgcgggcgtagctgggctcattcgcgcagccaacccagacatatctgtcgcgcaagcccgtcagattctgcgggataccgcgcaagaagcaggatcgttcacacagtacggctatggaatcgtcgatgctcatgccgccgttgttgctgcatccggtggtagcggcggc

SEQ ID NO: 536 - protein, 413 aa, synthetic construct
  REGION 1..413: note = Variant of serine peptidase from Bacillus sinesaloumensis
MADQASQANGNQDVIEGELIVSVEPKNGKPDVSIQSAQSVTGQEDVLKSKGFTIVDTLHVEDSSVKPLVSKNFNKKVVEKMGLVYLVQYSPDQFKSSNIAKKELRKELMDLGFKVRYISENYKMMAIEGTATLQAVHPNQNWHYAMIKAPEAWAITSGSSSVKVAVLDTGIDHNHPSLANFVNTNLGRSFVGGNTMDVQGHGTHVAGTIASYGSVSGVMQSATLIPVKVLDNSGSGSLYGITQGILYAADIDADVINMSLGGGGYNQSMDEAVQTAVAQGTIVVAATGNDGASSISYPAAYSSVIAVGSVTSNRTRSSFSNYGSGLEVMAPGSNIYSTYPNSRYTSLSGTSMATPHVAGVAGLIRAANPDISVAQARQILRDTAQEAGSFTQYGYGIVDAHAAVVAASGGSGG

SEQ ID NO: 537 - DNA, 1239 bp, synthetic construct
  misc_feature 1..1239: note = Variant of serine peptidase from Bacillus sinesaloumensis
  source 1..1239: mol_type = other DNA
atggcagatcaagctagtcaagctaatggaaaccaggacgtcattgaaggcgagctgatcgtttcagtggaaccgaagaacggtaaacctgatgtgagcattcaaagtgcacaatccgtaacagggcaggaagacgtccttaaatcgaaaggctttacgatcgttgataccttgcatgtagaggatagcagcgtcaagccactcgtctcgaagaatttcaataagaaagtggtggagaagatgggactggtgtatcttgttcaatactctccggaccagtttaaaagttccaacattgcgaagaaagaactcagaaaagaattgatggatctgggctttaaagtccgctatataagcgaaaattacaagatgatggcgatcgaaggtacagccactcttcaggcagtacaccctaaccaaaactggcattataatatgattaaagctccggaagcgtgggctattacgtctggatcctctagcgttaaagtagcagtcctggatacagggatcgaccataatcacccatccttggccaacttcgtgaatactaatcttggccggtcgtttgttggaggaaacaccatggatgttcaaggtcatggcacacatgttgctggcacgattgcatcttatgggagtgtaagcggagtgatgcagagtgcgacactgatcccggtcaaagtgctcgataattctggcagcgggtccctttacggtattacgcaaggcatattgtatgccgccgacatcgatgcggacgtcattaacatgtctctgggtggaggaggctataatcatagcatggatgaggctgttcaaacagcagttgctcagggaaccattgtagtagcagcgactggcaatgatggtgcatcgtcgatcagttatcctgctgcctacagcagcgtcattgcggtgggatctgtgacgtccaatcgtacacgatcctcgttttctaactatggatctgggcttgaagttatggcaccgggcagcaacatctacagtacgtatcctaattccagatatacatctttgagtggtacaagcatggctactccgcacgttgcgggcgtagctgggctcattcgcgcagccaacccagacatatctgtcgcgcaagcccgtcagattctgcgggataccgcgcaagaagcaggatcgttcacacagtacggctatggaatcgtcgatgctcatgccgccgttgttgctgcatccggtggtagcggcggc

SEQ ID NO: 538 - protein, 413 aa, synthetic construct
  REGION 1..413: note = Variant of serine peptidase from Bacillus sinesaloumensis
MADQASQANGNQDVIEGELIVSVEPKNGKPDVSIQSAQSVTGQEDVLKSKGFTIVDTLHVEDSSVKPLVSKNFNKKVVEKMGLVYLVQYSPDQFKSSNIAKKELRKELMDLGFKVRYISENYKMMAIEGTATLQAVHPNQNWHYNMIKAPEAWAITSGSSSVKVAVLDTGIDHNHPSLANFVNTNLGRSFVGGNTMDVQGHGTHVAGTIASYGSVSGVMQSATLIPVKVLDNSGSGSLYGITQGILYAADIDADVINMSLGGGGYNHSMDEAVQTAVAQGTIVVAATGNDGASSISYPAAYSSVIAVGSVTSNRTRSSFSNYGSGLEVMAPGSNIYSTYPNSRYTSLSGTSMATPHVAGVAGLIRAANPDISVAQARQILRDTAQEAGSFTQYGYGIVDAHAAVVAASGGSGG

SEQ ID NO: 539 - DNA, 1239 bp, synthetic construct
  misc_feature 1..1239: note = Variant of serine peptidase from Bacillus sinesaloumensis
  source 1..1239: mol_type = other DNA
atggcagatcaagctagtcaagctaatggaaaccaggacgtcattgaaggcgagctgatcgtttcagtggaaccgaagaacggtaaacctgatgtgagcattcaaagtgcacaatccgtaacagggcaggaagacgtccttaaatcgaaaggctttacgatcgttgataccttgcatgtagaggatagcagcgtcaagccactcgtctcgaagaatttcaataagaaagtggtggagaagatgggactggtgtatcttgttcaatactctccggaccagtttaaaagttccaacattgcgaagaaagaactcagaaaagaattgatggatctgggctttaaagtccgctatataagcgaaaattacaagatgatggcgatcgaaggtacagccactcttcaggcagtacaccctaaccaaaactggcattataatatgattaaagctccggaagcgtgggctattacgtctggatcctctagcgttaaagtagcagtcctggatacagggatcgaccataatcacccatccttggccaacttcgtgaatactaatcttggccggtcgtttgttggaggaaacaccatggatgttcaaggtcatggcacacatgttgctggcacgattgcatcttatgggagtgtaagcggagtgatgcagagtgcgacactgatcccggtcaaagtgctcgataattctggcagcgggtccctttacggtattacgcaaggcatattgtatgccgccgacatcgatgcggacgtcattaacatgtctctgggtggaggaggctataatcagagcatggatgaggctgttcaaacagcagttgctcagggaaccattgtagtagcagcgactggcaatgatggtgcatcgtcgatcagttatcctgctgcctacagcagcgtcattgcggtgggatctgtgacgtccaatcgtacacgatcctcgttttctaactatggatctgggcttgaagttatggcaccgggcagcaacatctacagtacgtatcctaattccagatatacatctttgagtggtacaagcatggctactccgcacgttgcgggcgtagctgggctcattcgcgcagccaacccagacatagtggtcgcgcaagcccgtcagattctgcgggataccgcgcaagaagcaggatcgttcacacagtacggctatggaatcgtcgatgctcatgccgccgttgttgctgcatccggtggtagcggcggc

SEQ ID NO: 540 - protein, 413 aa, synthetic construct
  REGION 1..413: note = Variant of serine peptidase from Bacillus sinesaloumensis
MADQASQANGNQDVIEGELIVSVEPKNGKPDVSIQSAQSVTGQEDVLKSKGFTIVDTLHVEDSSVKPLVSKNFNKKVVEKMGLVYLVQYSPDQFKSSNIAKKELRKELMDLGFKVRYISENYKMMAIEGTATLQAVHPNQNWHYNMIKAPEAWAITSGSSSVKVAVLDTGIDHNHPSLANFVNTNLGRSFVGGNTMDVQGHGTHVAGTIASYGSVSGVMQSATLIPVKVLDNSGSGSLYGITQGILYAADIDADVINMSLGGGGYNQSMDEAVQTAVAQGTIVVAATGNDGASSISYPAAYSSVIAVGSVTSNRTRSSFSNYGSGLEVMAPGSNIYSTYPNSRYTSLSGTSMATPHVAGVAGLIRAANPDIVVAQARQILRDTAQEAGSFTQYGYGIVDAHAAVVAASGGSGG

SEQ ID NO: 541 - DNA, 1239 bp, synthetic construct
  misc_feature 1..1239: note = Variant of serine peptidase from Bacillus sinesaloumensis
  source 1..1239: mol_type = other DNA
atggcagatcaagctagtcaagctaatggaaaccaggacgtcattgaaggcgagctgatcgtttcagtggaaccgaagaacggtaaacctgatgtgagcattcaaagtgcacaatccgtaacagggcaggaagacgtccttaaatcgaaaggctttacgatcgttgataccttgcatgtagaggatagcagcgtcaagccactcgtctcgaagaatttcaataagaaagtggtggagaagatgggactggtgtatcttgttcaatactctccggaccagtttaaaagttccaacattgcgaagaaagaactcagaaaagaattgatggatctgggctttaaagtccgctatataagcgaaaattacaagatgatggcgatcgaaggtggggccactcttcaggcagtacaccctaaccaaaactggcattataatatgattaaagctccggaagcgtgggctattacgtctggatcctctagcgttaaagtagcagtcctggatacagggatcgaccataatcacccatccttggccaacttcgtgaatactaatcttggccggtcgtttgttggaggaaacaccatggatgttcaaggtcatggcacacatgttgctggcacgattgcatcttatgggagtgtaagcggagtgatgcagagtgcgacactgatcccggtcaaagtgctcgataattctggcagcgggtccctttacggtattacgcaaggcatattgtatgccgccgacatcgatgcggacgtcattaacatgtctctgggtggaggaggctataatcagagcatggatgaggctgttcaaacagcagttgctcagggaaccattgtagtagcagcgactggcaatgatggtgcatcgtcgatcagttatcctgctgcctacagcagcgtcattgcggtgggatctgtgacgtccaatcgtacacgatcctcgttttctaactatggatctgggcttgaagttatggcaccgggcagcaacatctacagtacgtatcctaattccagatatacatctttgagtggtacaagcatggctactccgcacgttgcgggcgtagctgggctcattcgcgcagccaacccagacatatctgtcgcgcaagcccgtcagattctgcgggataccgcgcaagaagcaggatcgttcacacagtacggctatggaatcgtcgatgctcatgccgccgttgttgctgcatccggtggtagcggcggc

SEQ ID NO: 542 - protein, 413 aa, synthetic construct
  REGION 1..413: note = Variant of serine peptidase from Bacillus sinesaloumensis
MADQASQANGNQDVIEGELIVSVEPKNGKPDVSIQSAQSVTGQEDVLKSKGFTIVDTLHVEDSSVKPLVSKNFNKKVVEKMGLVYLVQYSPDQFKSSNIAKKELRKELMDLGFKVRYISENYKMMAIEGGATLQAVHPNQNWHYNMIKAPEAWAITSGSSSVKVAVLDTGIDHNHPSLANFVNTNLGRSFVGGNTMDVQGHGTHVAGTIASYGSVSGVMQSATLIPVKVLDNSGSGSLYGITQGILYAADIDADVINMSLGGGGYNQSMDEAVQTAVAQGTIVVAATGNDGASSISYPAAYSSVIAVGSVTSNRTRSSFSNYGSGLEVMAPGSNIYSTYPNSRYTSLSGTSMATPHVAGVAGLIRAANPDISVAQARQILRDTAQEAGSFTQYGYGIVDAHAAVVAASGGSGG

SEQ ID NO: 543 - DNA, 1239 bp, synthetic construct
  misc_feature 1..1239: note = Variant of serine peptidase from Bacillus sinesaloumensis
  source 1..1239: mol_type = other DNA
atggcagatcaagctagtcaagctaatggaaaccaggacgtcattgaaggcgagctgatcgtttcagtggaaccgaagaacggtaaacctgatgtgagcattcaaagtgcacaatccgtaacagggcaggaagacgtccttaaatcgaaaggctttacgatcgttgataccttgcatgtagaggatagcagcgtcaagccactcgtctcgaagaatttcaataagaaagtggtggagaagatgggactggtgtatcttgttcaatactctccggaccagtttaaaagttccaacattgcgaagaaagaactcagaaaagaattgatggatctgggctttaaagtccgctatataagcgaaaattacaagatgatggcgatcgaaggtacagccactcttcaggcagtacaccctaaccaaaactggcattataatatgattaaagctccggaagcgtgggctattacgtctggatcctctagcgttaaagtagcagtcctggatacagggatcgaccataatcacccatccttggccaacttcgtgaatactaatcttggccggtcgtttgttggaggaaacaccatggatgttcaaggtcatggcacacatgttgctggcacgattgcatcttatgggagtgtaagcggagtgatgcagagtgcgacactgatcccggtcaaagtgctcgataattctggcagcgggtccctttacggtattacgcaaggcatattgtatgccgccgacatcgatgcggacgtcattaacatgtctctgggtggaggaggctataatactagcatggatgaggctgttcaaacagcagttgctcagggaaccattgtagtagcagcgactggcaatgatggtgcatcgtcgatcagttatcctgctgcctacagcagcgtcattgcggtgggatctgtgacgtccaatcgtacacgatcctcgttttctaactatggatctgggcttgaagttatggcaccgggcagcaacatctacagtacgtatcctaattccagatatacatctttgagtggtacaagcatggctactccgcacgttgcgggcgtagctgggctcattcgcgcagccaacccagacatatctgtcgcgcaagcccgtcagattctgcgggataccgcgcaagaagcaggatcgttcacacagtacggctatggaatcgtcgatgctcatgccgccgttgttgctgcatccggtggtagcggcggc

SEQ ID NO: 544 - protein, 413 aa, synthetic construct
  REGION 1..413: note = Variant of serine peptidase from Bacillus sinesaloumensis
MADQASQANGNQDVIEGELIVSVEPKNGKPDVSIQSAQSVTGQEDVLKSKGFTIVDTLHVEDSSVKPLVSKNFNKKVVEKMGLVYLVQYSPDQFKSSNIAKKELRKELMDLGFKVRYISENYKMMAIEGTATLQAVHPNQNWHYNMIKAPEAWAITSGSSSVKVAVLDTGIDHNHPSLANFVNTNLGRSFVGGNTMDVQGHGTHVAGTIASYGSVSGVMQSATLIPVKVLDNSGSGSLYGITQGILYAADIDADVINMSLGGGGYNTSMDEAVQTAVAQGTIVVAATGNDGASSISYPAAYSSVIAVGSVTSNRTRSSFSNYGSGLEVMAPGSNIYSTYPNSRYTSLSGTSMATPHVAGVAGLIRAANPDISVAQARQILRDTAQEAGSFTQYGYGIVDAHAAVVAASGGSGG

SEQ ID NO: 545 - DNA, 1239 bp, synthetic construct
  misc_feature 1..1239: note = Variant of serine peptidase from Bacillus sinesaloumensis
  source 1..1239: mol_type = other DNA
atggcagatcaagctagtcaagctaatggaaaccaggacgtcattgaaggcgagctgatcgtttcagtggaaccgaagaacggtaaacctgatgtgagcattcaaagtgcacaatccgtaacagggcaggaagacgtccttaaatcgaaaggctttacgatcgttgataccttgcatgtagaggatagcagcgtcaagccactcgtctcgaagaatttcaataagaaagtggtggagaagatgggactggtgtatcttgttcaatactctccggaccagtttaaaagttccaacattgcgaagaaagaactcagaaaagaattgatggatctgggctttaaagtccgctatataagcgaaaattacaagatgatggcgatcgaaggtacagccactcttcaggcagtacaccctaaccaaaactggcattataatatgattaaagctccggaagcgtgggctattacgtctggatcctctagcgttaaagtagcagtcctggatacagggatcgaccataatcacccatccttggccaacttcgtgaatactaatcttggccggtcgtttgttggaggaaacaccatggatgttcaaggtcatggcacacatgttgctggcacgattgcatcttatgggagtgtaagcggagtgatgcagagtgcgacactgatcccggtcaaagtgctcgataattctggcagcgggtccctttacggtattacgcaaggcatattgtatgccgccgacatcgatgcggacgtcattaacatgtctctgggtggaggaggctataatcagagcatggatgaggctgtttggacagcagttgctcagggaaccattgtagtagcagcgactggcaatgatggtgcatcgtcgatcagttatcctgctgcctacagcagcgtcattgcggtgggatctgtgacgtccaatcgtacacgatcctcgttttctaactatggatctgggcttgaagttatggcaccgggcagcaacatctacagtacgtatcctaattccagatatacatctttgagtggtacaagcatggctactccgcacgttgcgggcgtagctgggctcattcgcgcagccaacccagacatatctgtcgcgcaagcccgtcagattctgcgggataccgcgcaagaagcaggatcgttcacacagtacggctatggaatcgtcgatgctcatgccgccgttgttgctgcatccggtggtagcggcggc

SEQ ID NO: 546 - protein, 413 aa, synthetic construct
  REGION 1..413: note = Variant of serine peptidase from Bacillus sinesaloumensis
MADQASQANGNQDVIEGELIVSVEPKNGKPDVSIQSAQSVTGQEDVLKSKGFTIVDTLHVEDSSVKPLVSKNFNKKVVEKMGLVYLVQYSPDQFKSSNIAKKELRKELMDLGFKVRYISENYKMMAIEGTATLQAVHPNQNWHYNMIKAPEAWAITSGSSSVKVAVLDTGIDHNHPSLANFVNTNLGRSFVGGNTMDVQGHGTHVAGTIASYGSVSGVMQSATLIPVKVLDNSGSGSLYGITQGILYAADIDADVINMSLGGGGYNQSMDEAVWTAVAQGTIVVAATGNDGASSISYPAAYSSVIAVGSVTSNRTRSSFSNYGSGLEVMAPGSNIYSTYPNSRYTSLSGTSMATPHVAGVAGLIRAANPDISVAQARQILRDTAQEAGSFTQYGYGIVDAHAAVVAASGGSGG

SEQ ID NO: 547 - DNA, 1239 bp, synthetic construct
  misc_feature 1..1239: note = Variant of serine peptidase from Bacillus sinesaloumensis
  source 1..1239: mol_type = other DNA
atggcagatcaagctagtcaagctaatggaaaccaggacgtcattgaaggcgagctgatcgtttcagtggaaccgaagaacggtaaacctgatgtgagcattcaaagtgcacaatccgtaacagggcaggaagacgtccttaaatcgaaaggctttacgatcgttgataccttgcatgtagaggatagcagcgtcaagccactcgtctcgaagaatttcaataagaaagtggtggagaagatgggactggtgtatcttgttcaatactctccggaccagtttaaaagttccaacattgcgaagaaagaactcagaaaagaattgatggatctgggctttaaagtccgctatataagcgaaaattacaagatgatggcgatcgaaggtacagccactcttcaggcaatgcaccctaaccaaaactggcattataatatgattaaagctccggaagcgtgggctattacgtctggatcctctagcgttaaagtagcagtcctggatacagggatcgaccataatcacccatccttggccaacttcgtgaatactaatcttggccggtcgtttgttggaggaaacaccatggatgttcaaggtcatggcacacatgttgctggcacgattgcatcttatgggagtgtaagcggagtgatgcagagtgcgacactgatcccggtcaaagtgctcgataattctggcagcgggtccctttacggtattacgcaaggcatattgtatgccgccgacatcgatgcggacgtcattaacatgtctctgggtggaggaggctataatcagagcatggatgaggctgttcaaacagcagttgctcagggaaccattgtagtagcagcgactggcaatgatggtgcatcgtcgatcagttatcctgctgcctacagcagcgtcattgcggtgggatctgtgacgtccaatcgtacacgatcctcgttttctaactatggatctgggcttgaagttatggcaccgggcagcaacatctacagtacgtatcctaattccagatatacatctttgagtggtacaagcatggctactccgcacgttgcgggcgtagctgggctcattcgcgcagccaacccagacatatctgtcgcgcaagcccgtcagattctgcgggataccgcgcaagaagcaggatcgttcacacagtacggctatggaatcgtcgatgctcatgccgccgttgttgctgcatccggtggtagcggcggc

SEQ ID NO: 548 - protein, 413 aa, synthetic construct
  REGION 1..413: note = Variant of serine peptidase from Bacillus sinesaloumensis
MADQASQANGNQDVIEGELIVSVEPKNGKPDVSIQSAQSVTGQEDVLKSKGFTIVDTLHVEDSSVKPLVSKNFNKKVVEKMGLVYLVQYSPDQFKSSNIAKKELRKELMDLGFKVRYISENYKMMAIEGTATLQAMHPNQNWHYNMIKAPEAWAITSGSSSVKVAVLDTGIDHNHPSLANFVNTNLGRSFVGGNTMDVQGHGTHVAGTIASYGSVSGVMQSATLIPVKVLDNSGSGSLYGITQGILYAADIDADVINMSLGGGGYNQSMDEAVQTAVAQGTIVVAATGNDGASSISYPAAYSSVIAVGSVTSNRTRSSFSNYGSGLEVMAPGSNIYSTYPNSRYTSLSGTSMATPHVAGVAGLIRAANPDISVAQARQILRDTAQEAGSFTQYGYGIVDAHAAVVAASGGSGG

SEQ ID NO: 549 - DNA, 1239 bp, synthetic construct
  misc_feature 1..1239: note = Variant of serine peptidase from Bacillus sinesaloumensis
  source 1..1239: mol_type = other DNA
atggcagatcaagctagtcaagctaatggaaaccaggacgtcattgaaggcgagctgatcgtttcagtggaaccgaagaacggtaaacctgatgtgagcattcaaagtgcacaatccgtaacagggcaggaagacgtccttaaatcgaaaggctttacgatcgttgataccttgcatgtagaggatagcagcgtcaagccactcgtctcgaagaatttcaataagaaagtggtggagaagatgggactggtgtatcttgttcaatactctccggaccagtttaaaagttccaacattgcgaagaaagaactcagaaaagaattgatggatctgggctttaaagtccgctatataagcgaaaattacaagatgatggcgatcgaaggtacagccactcttcaggcagtacaccctaaccaaaactggcattataatatgattaaagctccggaagcgtgggctattacgtctggatcctctagcgttaaagtagcagtcctggatacagggatcgaccataatcacccatccttggccaacttcgtgaatactaatcttggccggtcgtttgttggaggaaacaccatggatgttcaaggtcatggcacacatgttgctggcacgattgcatcttatgggagtgtaagcggagtgatgcagagtgcgacactgatcccggtcaaagtgctcgataattctggcagcgggtccctttacggtattacgcaaggcatattgtatgccgccgacatcgatgcggacgtcattaacatgtctctgggtggaggaggctataatcagagcatggatgaggctgttcaaacagcagttgctcagggaaccattgtagtagcagcgactggcaatgatggtgcatcgtcgatcagttatcctgctgcctacagcagcgtcattgcggtgggatctgtgacgtccaatcgtacacgatcctcgttttctaactatggatctgggcttgaagttatggcaccgggcagcaacatctacagtacgtatcctaattccagatatacatctttgagtggtacaagcatggctactccgcacgttgcgggcgtagctgggctcattcgcgcagccaacccagacatatgtgtcgcgcaagcccgtcagattctgcgggataccgcgcaagaagcaggatcgttcacacagtacggctatggaatcgtcgatgctcatgccgccgttgttgctgcatccggtggtagcggcggc

SEQ ID NO: 550 - protein, 413 aa, synthetic construct
  REGION 1..413: note = Variant of serine peptidase from Bacillus sinesaloumensis
MADQASQANGNQDVIEGELIVSVEPKNGKPDVSIQSAQSVTGQEDVLKSKGFTIVDTLHVEDSSVKPLVSKNFNKKVVEKMGLVYLVQYSPDQFKSSNIAKKELRKELMDLGFKVRYISENYKMMAIEGTATLQAVHPNQNWHYNMIKAPEAWAITSGSSSVKVAVLDTGIDHNHPSLANFVNTNLGRSFVGGNTMDVQGHGTHVAGTIASYGSVSGVMQSATLIPVKVLDNSGSGSLYGITQGILYAADIDADVINMSLGGGGYNQSMDEAVQTAVAQGTIVVAATGNDGASSISYPAAYSSVIAVGSVTSNRTRSSFSNYGSGLEVMAPGSNIYSTYPNSRYTSLSGTSMATPHVAGVAGLIRAANPDICVAQARQILRDTAQEAGSFTQYGYGIVDAHAAVVAASGGSGG

SEQ ID NO: 551 - DNA, 1239 bp, synthetic construct
  misc_feature 1..1239: note = Variant of serine peptidase from Bacillus sinesaloumensis
  source 1..1239: mol_type = other DNA
atggcagatcaagctagtcaagctaatggaaaccaggacgtcattgaaggcgagctgatcgtttcagtggaaccgaagaacggtaaacctgatgtgagcattcaaagtgcacaatccgtaacagggcaggaagacgtccttaaatcgaaaggctttacgatcgttgataccttgcatgtagaggatagcagcgtcaagccactcgtctcgaagaatttcaataagaaagtggtggagaagatgggactggtgtatcttgttcaatactctccggaccagtttaaaagttccaacattgcgaagaaagaactcagaaaagaattgatggatctgggctttaaagtccgctatataagcgaaaattacaagatgatggcgatcgaaggtacagccactcttcaggcagtacaccctaaccaaaactggcattataatatgattaaagctccggaagcgtgggctattacgtctggatcctctagcgttaaagtagcagtcctggatacagggatcgaccataatcacccatccttggccaacttcgtgaatactaatcttggccggtcgtttgttggaggaacgaccatggatgttcaaggtcatggcacacatgttgctggcacgattgcatcttatgggagtgtaagcggagtgatgcagagtgcgacactgatcccggtcaaagtgctcgataattctggcagcgggtccctttacggtattacgcaaggcatattgtatgccgccgacatcgatgcggacgtcattaacatgtctctgggtggaggaggctataatcagagcatggatgaggctgttcaaacagcagttgctcagggaaccattgtagtagcagcgactggcaatgatggtgcatcgtcgatcagttatcctgctgcctacagcagcgtcattgcggtgggatctgtgacgtccaatcgtacacgatcctcgttttctaactatggatctgggcttgaagttatggcaccgggcagcaacatctacagtacgtatcctaattccagatatacatctttgagtggtacaagcatggctactccgcacgttgcgggcgtagctgggctcattcgcgcagccaacccagacatatctgtcgcgcaagcccgtcagattctgcgggataccgcgcaagaagcaggatcgttcacacagtacggctatggaatcgtcgatgctcatgccgccgttgttgctgcatccggtggtagcggcggc

SEQ ID NO: 552 - protein, 413 aa, synthetic construct
  REGION 1..413: note = Variant of serine peptidase from Bacillus sinesaloumensis
MADQASQANGNQDVIEGELIVSVEPKNGKPDVSIQSAQSVTGQEDVLKSKGFTIVDTLHVEDSSVKPLVSKNFNKKVVEKMGLVYLVQYSPDQFKSSNIAKKELRKELMDLGFKVRYISENYKMMAIEGTATLQAVHPNQNWHYNMIKAPEAWAITSGSSSVKVAVLDTGIDHNHPSLANFVNTNLGRSFVGGTTMDVQGHGTHVAGTIASYGSVSGVMQSATLIPVKVLDNSGSGSLYGITQGILYAADIDADVINMSLGGGGYNQSMDEAVQTAVAQGTIVVAATGNDGASSISYPAAYSSVIAVGSVTSNRTRSSFSNYGSGLEVMAPGSNIYSTYPNSRYTSLSGTSMATPHVAGVAGLIRAANPDISVAQARQILRDTAQEAGSFTQYGYGIVDAHAAVVAASGGSGG

SEQ ID NO: 553 - DNA, 1239 bp, synthetic construct
  misc_feature 1..1239: note = Variant of serine peptidase from Bacillus sinesaloumensis
  source 1..1239: mol_type = other DNA
atggcagatcaagctagtcaagctaatggaaaccaggacgtcattgaaggcgagctgatcgtttcagtggaaccgaagaacggtaaacctgatgtgagcattcaaagtgcacaatccgtaacagggcaggaagacgtccttaaatcgaaaggctttacgatcgttgataccttgcatgtagaggatagcagcgtcaagccactcgtctcgaagaatttcaataagaaagtggtggagaagatgggactggtgtatcttgttcaatactctccggaccagtttaaaagttccaacattgcgaagaaagaactcagaaaagaattgatggatctgggctttaaagtccgctatataagcgaaaattacaagatgatggcgatcgaaggtacagccactcttcaggcagtacaccctaaccaaaactggcattataatatgattaaagctccggaagcgtgggctattacgtctggatcctctagcgttaaagtagcagtcctggatacagggatcgaccataatcacccatccttggccaacttcgtgaatactaatcttggccggtcgtttgttggaggaaacaccatggatgttcaaggtcatggcacacatgttgctggcacgattgcatcttatgggagtgtaagcggagtgatgcagagtgcgacactgatcccggtcaaagtgctcgataattctggcagcgggtccctttacggtattacgcaaggcatattgtatgccgccgacatcgatgcggacgtcattaacatgtctctgggtggaggaggctataatcagagcatggatgaggctgttcaaacagcagttgctcagggaaccattgtagtagcagcgactggcaatgatggtgcatcgtcgatcagttatcctgctgcctacagcagcgtcattgcggtgggatctgtgacgtccaatcgtacacgatcctcgttttctaactatggatctgggcttgaagttatggcaccgggcagcaacatctacagtacgtatcctaattccagatatacatctttgagtggtacaagcatggctactccgcacgttgcgggcgtagctgggctcattcgcgcagccaacccagacatatctgtcgcggtggcccgtcagattctgcgggataccgcgcaagaagcaggatcgttcacacagtacggctatggaatcgtcgatgctcatgccgccgttgttgctgcatccggtggtagcggcggc

SEQ ID NO: 554 - protein, 413 aa, synthetic construct
  REGION 1..413: note = Variant of serine peptidase from Bacillus sinesaloumensis
MADQASQANGNQDVIEGELIVSVEPKNGKPDVSIQSAQSVTGQEDVLKSKGFTIVDTLHVEDSSVKPLVSKNFNKKVVEKMGLVYLVQYSPDQFKSSNIAKKELRKELMDLGFKVRYISENYKMMAIEGTATLQAVHPNQNWHYNMIKAPEAWAITSGSSSVKVAVLDTGIDHNHPSLANFVNTNLGRSFVGGNTMDVQGHGTHVAGTIASYGSVSGVMQSATLIPVKVLDNSGSGSLYGITQGILYAADIDADVINMSLGGGGYNQSMDEAVQTAVAQGTIVVAATGNDGASSISYPAAYSSVIAVGSVTSNRTRSSFSNYGSGLEVMAPGSNIYSTYPNSRYTSLSGTSMATPHVAGVAGLIRAANPDISVAVARQILRDTAQEAGSFTQYGYGIVDAHAAVVAASGGSGG

SEQ ID NO: 555 - DNA, 1239 bp, synthetic construct
  misc_feature 1..1239: note = Variant of serine peptidase from Bacillus sinesaloumensis
  source 1..1239: mol_type = other DNA
atggcagatcaagctagtcaagctaatggaaaccaggacgtcattgaaggcgagctgatcgtttcagtggaaccgaagaacggtaaacctgatgtgagcattcaaagtgcacaatccgtaacagggcaggaagacgtccttaaatcgaaaggctttacgatcgttgataccttgcatgtagaggatagcagcgtcaagccactcgtctcgaagaatttcaataagaaagtggtggagaagatgggactggtgtatcttgttcaatactctccggaccagtttaaaagttccaacattgcgaagaaagaactcagaaaagaattgatggatctgggctttaaagtccgctatataagcgaaaattacaagatgatggcgatcgaaggtacagccactcttcagggtgtacaccctaaccaaaactggcattataatatgattaaagctccggaagcgtgggctattacgtctggatcctctagcgttaaagtagcagtcctggatacagggatcgaccataatcacccatccttggccaacttcgtgaatactaatcttggccggtcgtttgttggaggaaacaccatggatgttcaaggtcatggcacacatgttgctggcacgattgcatcttatgggagtgtaagcggagtgatgcagagtgcgacactgatcccggtcaaagtgctcgataattctggcagcgggtccctttacggtattacgcaaggcatattgtatgccgccgacatcgatgcggacgtcattaacatgtctctgggtggaggaggctataatcagagcatggatgaggctgttcaaacagcagttgctcagggaaccattgtagtagcagcgactggcaatgatggtgcatcgtcgatcagttatcctgctgcctacagcagcgtcattgcggtgggatctgtgacgtccaatcgtacacgatcctcgttttctaactatggatctgggcttgaagttatggcaccgggcagcaacatctacagtacgtatcctaattccagatatacatctttgagtggtacaagcatggctactccgcacgttgcgggcgtagctgggctcattcgcgcagccaacccagacatatctgtcgcgcaagcccgtcagattctgcgggataccgcgcaagaagcaggatcgttcacacagtacggctatggaatcgtcgatgctcatgccgccgttgttgctgcatccggtggtagcggcggc

SEQ ID NO: 556 - protein, 413 aa, synthetic construct
  REGION 1..413: note = Variant of serine peptidase from Bacillus sinesaloumensis
MADQASQANGNQDVIEGELIVSVEPKNGKPDVSIQSAQSVTGQEDVLKSKGFTIVDTLHVEDSSVKPLVSKNFNKKVVEKMGLVYLVQYSPDQFKSSNIAKKELRKELMDLGFKVRYISENYKMMAIEGTATLQGVHPNQNWHYNMIKAPEAWAITSGSSSVKVAVLDTGIDHNHPSLANFVNTNLGRSFVGGNTMDVQGHGTHVAGTIASYGSVSGVMQSATLIPVKVLDNSGSGSLYGITQGILYAADIDADVINMSLGGGGYNQSMDEAVQTAVAQGTIVVAATGNDGASSISYPAAYSSVIAVGSVTSNRTRSSFSNYGSGLEVMAPGSNIYSTYPNSRYTSLSGTSMATPHVAGVAGLIRAANPDISVAQARQILRDTAQEAGSFTQYGYGIVDAHAAVVAASGGSGG

SEQ ID NO: 557 - DNA, 1239 bp, synthetic construct
  misc_feature 1..1239: note = Variant of serine peptidase from Bacillus sinesaloumensis
  source 1..1239: mol_type = other DNA
atggcagatcaagctagtcaagctaatggaaaccaggacgtcattgaaggcgagctgatcgtttcagtggaaccgaagaacggtaaacctgatgtgagcattcaaagtgcacaatccgtaacagggcaggaagacgtccttaaatcgaaaggctttacgatcgttgataccttgcatgtagaggatagcagcgtcaagccactcgtctcgaagaatttcaataagaaagtggtggagaagatgggactggtgtatcttgttcaatactctccggaccagtttaaaagttccaacattgcgaagaaagaactcagaaaagaattgatggatctgggctttaaagtccgctatataagcgaaaattacaagatgatggcgatcgaaggtacagccactcttcaggcagtacaccctaaccaaaactggcattataatatgattaaagctccggaagcgtgggctattacgtctggatcctctagcgttaaagtagcagtcctggatacagggatcgaccataatcacccatccttggccaacttcgtgaatactaatcttggccggtcgtttgttggaggaaacaccatggatgttcaaggtcatggcacacatgttgctggcacgattgcatcttatgggagtgtaagcggagtgatgcagagtgcgacactgatcccggtcaaagtgctcgataattctggcagcgggtccctttacggtattacgcaaggcatattgtatgccgccgacatcgatgcggacgtcattaacatgtctctgggtggaggaggctataatattagcatggatgaggctgttcaaacagcagttgctcagggaaccattgtagtagcagcgactggcaatgatggtgcatcgtcgatcagttatcctgctgcctacagcagcgtcattgcggtgggatctgtgacgtccaatcgtacacgatcctcgttttctaactatggatctgggcttgaagttatggcaccgggcagcaacatctacagtacgtatcctaattccagatatacatctttgagtggtacaagcatggctactccgcacgttgcgggcgtagctgggctcattcgcgcagccaacccagacatatctgtcgcgcaagcccgtcagattctgcgggataccgcgcaagaagcaggatcgttcacacagtacggctatggaatcgtcgatgctcatgccgccgttgttgctgcatccggtggtagcggcggc

SEQ ID NO: 558 - protein, 413 aa, synthetic construct
  REGION 1..413: note = Variant of serine peptidase from Bacillus sinesaloumensis
MADQASQANGNQDVIEGELIVSVEPKNGKPDVSIQSAQSVTGQEDVLKSKGFTIVDTLHVEDSSVKPLVSKNFNKKVVEKMGLVYLVQYSPDQFKSSNIAKKELRKELMDLGFKVRYISENYKMMAIEGTATLQAVHPNQNWHYNMIKAPEAWAITSGSSSVKVAVLDTGIDHNHPSLANFVNTNLGRSFVGGNTMDVQGHGTHVAGTIASYGSVSGVMQSATLIPVKVLDNSGSGSLYGITQGILYAADIDADVINMSLGGGGYNISMDEAVQTAVAQGTIVVAATGNDGASSISYPAAYSSVIAVGSVTSNRTRSSFSNYGSGLEVMAPGSNIYSTYPNSRYTSLSGTSMATPHVAGVAGLIRAANPDISVAQARQILRDTAQEAGSFTQYGYGIVDAHAAVVAASGGSGG

SEQ ID NO: 559 - DNA, 1239 bp, synthetic construct
  misc_feature 1..1239: note = Variant of serine peptidase from Bacillus sinesaloumensis
  source 1..1239: mol_type = other DNA
atggcagatcaagctagtcaagctaatggaaaccaggacgtcattgaaggcgagctgatcgtttcagtggaaccgaagaacggtaaacctgatgtgagcattcaaagtgcacaatccgtaacagggcaggaagacgtccttaaatcgaaaggctttacgatcgttgataccttgcatgtagaggatagcagcgtcaagccactcgtctcgaagaatttcaataagaaagtggtggagaagatgggactggtgtatcttgttcaatactctccggaccagtttaaaagttccaacattgcgaagaaagaactcagaaaagaattgatggatctgggctttaaagtccgctatataagcgaaaattacaagatgatggcgatcgaaggtacagccactcttcaggcagtacaccctaaccaattgtggcattataatatgattaaagctccggaagcgtgggctattacgtctggatcctctagcgttaaagtagcagtcctggatacagggatcgaccataatcacccatccttggccaacttcgtgaatactaatcttggccggtcgtttgttggaggaaacaccatggatgttcaaggtcatggcacacatgttgctggcacgattgcatcttatgggagtgtaagcggagtgatgcgtagtgcgacactgatcccggtcaaagtgctcgataattctggcagcgggtccctttacggtattacgcaaggcatattgtatgccgccgacatcgatgcggacgtcattaacatgtctctgggtggaggaggctataatcagagcatggatgaggctgttcaaacagcagttgctcagggaaccattgtagtagcagcgactggcaatgatggtgcatcgtcgatcagttatcctgctgcctacagcagcgtcattgcggtgggatctgtgacgtccaatcgtacacgatcctcgttttctaactatggatctgggcttgaagttatggcaccgggcagcaacatctacagtacgtatcctaattccagatatacatctttgagtggtacaagcatggctactccgcacgttgcgggcgtagctgggctcattcgcgcagccaacccagacatatctgtcgcgcaagcccgtcagattctgcgggataccgcgcaagaagcaggatcgttcacacagtacggctatggaatcgtcgatgctcatgccgccgttgttgctgcatccggtggtagcggcggc

SEQ ID NO: 560 - protein, 413 aa, synthetic construct
  REGION 1..413: note = Variant of serine peptidase from Bacillus sinesaloumensis
MADQASQANGNQDVIEGELIVSVEPKNGKPDVSIQSAQSVTGQEDVLKSKGFTIVDTLHVEDSSVKPLVSKNFNKKVVEKMGLVYLVQYSPDQFKSSNIAKKELRKELMDLGFKVRYISENYKMMAIEGTATLQAVHPNQLWHYNMIKAPEAWAITSGSSSVKVAVLDTGIDHNHPSLANFVNTNLGRSFVGGNTMDVQGHGTHVAGTIASYGSVSGVMRSATLIPVKVLDNSGSGSLYGITQGILYAADIDADVINMSLGGGGYNQSMDEAVQTAVAQGTIVVAATGNDGASSISYPAAYSSVIAVGSVTSNRTRSSFSNYGSGLEVMAPGSNIYSTYPNSRYTSLSGTSMATPHVAGVAGLIRAANPDISVAQARQILRDTAQEAGSFTQYGYGIVDAHAAVVAASGGSGG

SEQ ID NO: 561 - DNA, 1239 bp, synthetic construct
  misc_feature 1..1239: note = Variant of serine peptidase from Bacillus sinesaloumensis
  source 1..1239: mol_type = other DNA
atggcagatcaagctagtcaagctaatggaaaccaggacgtcattgaaggcgagctgatcgtttcagtggaaccgaagaacggtaaacctgatgtgagcattcaaagtgcacaatccgtaacagggcaggaagacgtccttaaatcgaaaggctttacgatcgttgataccttgcatgtagaggatagcagcgtcaagccactcgtctcgaagaatttcaataagaaagtggtggagaagatgggactggtgtatcttgttcaatactctccggaccagtttaaaagttccaacattgcgaagaaagaactcagaaaagaattgatggatctgggctttaaagtccgctatataagcgaaaattacaagatgatggcgatcgaaggtacagccactcttcaggcagtacaccctaaccaaaactggcattataatatgattaaagctccggaagcgtgggctattacgtctggatcctctagcgttaaagtagcagtcctggatacagggatcgaccataatcacccatccttggccaacttcgtgaatactaatcttggccggtcgtttgttggaggaaacaccatggatgttcaaggtcatggcacacatgttgctggcacgattgcatcttatgggagtgtaagcggagtgatgcagagtgcgacactgatcccggtcaaagtgctcgataattctggcagcgggtccctttacggtattacgcaaggcatattgtatgccgccgacatcgatgcggacgtcattaacatgtctctgggtggaggaggctataatcagagcatggatgaggctgttcaaacagcagttgctcagggaaccattgtagtagcagcgactggcaatgatggtgcatcgtcgatcagttatcctgctgcctacagcagcgtcattgcggtgggatctgtgacgtccaatcgtacacgatcctcgttttctaactatggagaggggcttgaagttatggcaccgggcagcaacatctacagtacgtatcctaattccagatatacatctttgagtggtacaagcatggctactccgcacgttgcgggcgtagctgggctcattcgcgcagccaacccagacatatctgtcgcgcaagcccgtcagattctgcgggataccgcgcaagaagcaggatcgttcacacagtacggctatggaatcgtcgatgctcatgccgccgttgttgctgcatccggtggtagcggcggc

SEQ ID NO: 562 - protein, 413 aa, synthetic construct
  REGION 1..413: note = Variant of serine peptidase from Bacillus sinesaloumensis
MADQASQANGNQDVIEGELIVSVEPKNGKPDVSIQSAQSVTGQEDVLKSKGFTIVDTLHVEDSSVKPLVSKNFNKKVVEKMGLVYLVQYSPDQFKSSNIAKKELRKELMDLGFKVRYISENYKMMAIEGTATLQAVHPNQNWHYNMIKAPEAWAITSGSSSVKVAVLDTGIDHNHPSLANFVNTNLGRSFVGGNTMDVQGHGTHVAGTIASYGSVSGVMQSATLIPVKVLDNSGSGSLYGITQGILYAADIDADVINMSLGGGGYNQSMDEAVQTAVAQGTIVVAATGNDGASSISYPAAYSSVIAVGSVTSNRTRSSFSNYGEGLEVMAPGSNIYSTYPNSRYTSLSGTSMATPHVAGVAGLIRAANPDISVAQARQILRDTAQEAGSFTQYGYGIVDAHAAVVAASGGSGG

SEQ ID NO: 563 - DNA, 1239 bp, synthetic construct
  misc_feature 1..1239: note = Variant of serine peptidase from Bacillus sinesaloumensis
  source 1..1239: mol_type = other DNA
atggcagatcaagctagtcaagctaatggaaaccaggacgtcattgaaggcgagctgatcgtttcagtggaaccgaagaacggtaaacctgatgtgagcattcaaagtgcacaatccgtaacagggcaggaagacgtccttaaatcgaaaggctttacgatcgttgataccttgcatgtagaggatagcagcgtcaagccactcgtctcgaagaatttcaataagaaagtggtggagaagatgggactggtgtatcttgttcaatactctccggaccagtttaaaagttccaacattgcgaagaaagaactcagaaaagaattgatggatctgggctttaaagtccgctatataagcgaaaattacaagatgatggcgatcgaaggtacagccactcttcaggcagtacaccctaaccaaaactggcattataatatgattaaagctccggaagcgtgggctattacgtctggatccttgagcgttaaagtagcagtcctggatacagggatcgaccataatcacccatccttggccaacttcgtgaatactaatcttggccggtcgtttgttggaggaaacaccatggatgttcaaggtcatggcacacatgttgctggcacgattgcatcttatgggagtgtaagcggagtgatgcagagtgcgacactgatcccggtcaaagtgctcgataattctggcagcgggtccctttacggtattacgcaaggcatattgtatgccgccgacatcgatgcggacgtcattaacatgtctctgggtggaggaggctataatcagagcatggatgaggctgttcaaacagcagttgctcagggaaccattgtagtagcagcgactggcaatgatggtgcatcgtcgatcagttatcctgctgcctacagcagcgtcattgcggtgggatctgtgacgtccaatcgtacacgatcctcgttttctaactatggatctgggcttgaagttatggcaccgggcagcaacatctacagtacgtatcctaattccagatatacatctttgagtggtacaagcatggctactccgcacgttgcgggcgtagctgggctcattcgcgcagccaacccagacatatctgtcgcgcaagcccgtcagattctgcgggataccgcgcaagaagcaggatcgttcacacagtacggctatggaatcgtcgatgctcatgccgccgttgttgctgcatccggtggtagcggcggc

SEQ ID NO: 564 - protein, 413 aa, synthetic construct
  REGION 1..413: note = Variant of serine peptidase from Bacillus sinesaloumensis
MADQASQANGNQDVIEGELIVSVEPKNGKPDVSIQSAQSVTGQEDVLKSKGFTIVDTLHVEDSSVKPLVSKNFNKKVVEKMGLVYLVQYSPDQFKSSNIAKKELRKELMDLGFKVRYISENYKMMAIEGTATLQAVHPNQNWHYNMIKAPEAWAITSGSLSVKVAVLDTGIDHNHPSLANFVNTNLGRSFVGGNTMDVQGHGTHVAGTIASYGSVSGVMQSATLIPVKVLDNSGSGSLYGITQGILYAADIDADVINMSLGGGGYNQSMDEAVQTAVAQGTIVVAATGNDGASSISYPAAYSSVIAVGSVTSNRTRSSFSNYGSGLEVMAPGSNIYSTYPNSRYTSLSGTSMATPHVAGVAGLIRAANPDISVAQARQILRDTAQEAGSFTQYGYGIVDAHAAVVAASGGSGG

SEQ ID NO: 565 - DNA, 1239 bp, synthetic construct
  misc_feature 1..1239: note = Variant of serine peptidase from Bacillus sinesaloumensis
  source 1..1239: mol_type = other DNA
atggcagatcaagctagtcaagctaatggaaaccaggacgtcattgaaggcgagctgatcgtttcagtggaaccgaagaacggtaaacctgatgtgagcattcaaagtgcacaatccgtaacagggcaggaagacgtccttaaatcgaaaggctttacgatcgttgataccttgcatgtagaggatagcagcgtcaagccactcgtctcgaagaatttcaataagaaagtggtggagaagatgggactggtgtatcttgttcaatactctccggaccagtttaaaagttccaacattgcgaagaaagaactcagaaaagaattgatggatctgggctttaaagtccgctatataagcgaaaattacaagatgatggcgatcgaaggtacagccactcttcaggcagtacaccctaaccaaagttggcattataatatgattaaagctccggaagcgtgggctattacgtctggatcctctagcgttaaagtagcagtcctggatacagggatcgaccataatcacccatccttggccaacttcgtgaatactaatcttggccggtcgtttgttggaggaaacaccatggatgttcaaggtcatggcacacatgttgctggcacgattgcatcttatgggagtgtaagcggagtgatgcagagtgcgacactgatcccggtcaaagtgctcgataattctggcagcgggtccctttacggtattacgcaaggcatattgtatgccgccgacatcgatgcggacgtcattaacatgtctctgggtggaggaggctataatcagagcatggatgaggctgttcaaacagcagttgctcagggaaccattgtagtagcagcgactggcaatgatggtgcatcgtcgatcagttatcctgctgcctacagcagcgtcattgcggtgggatctgtgacgtccaatcgtacacgatcctcgttttctaactatggatctgggcttgaagttatggcaccgggcagcaacatctacagtacgtatcctaattccagatatacatctttgagtggtacaagcatggctactccgcacgttgcgggcgtagctgggctcattcgcgcagccaacccagacatatctgtcgcgcaagcccgtcagattctgcgggataccgcgcaagaagcaggatcgttcacacagtacggctatggaatcgtcgatgctcatgccgccgttgttgctgcatccggtggtagcggcggc

SEQ ID NO: 566 - protein, 413 aa, synthetic construct
  REGION 1..413: note = Variant of serine peptidase from Bacillus sinesaloumensis
MADQASQANGNQDVIEGELIVSVEPKNGKPDVSIQSAQSVTGQEDVLKSKGFTIVDTLHVEDSSVKPLVSKNFNKKVVEKMGLVYLVQYSPDQFKSSNIAKKELRKELMDLGFKVRYISENYKMMAIEGTATLQAVHPNQSWHYNMIKAPEAWAITSGSSSVKVAVLDTGIDHNHPSLANFVNTNLGRSFVGGNTMDVQGHGTHVAGTIASYGSVSGVMQSATLIPVKVLDNSGSGSLYGITQGILYAADIDADVINMSLGGGGYNQSMDEAVQTAVAQGTIVVAATGNDGASSISYPAAYSSVIAVGSVTSNRTRSSFSNYGSGLEVMAPGSNIYSTYPNSRYTSLSGTSMATPHVAGVAGLIRAANPDISVAQARQILRDTAQEAGSFTQYGYGIVDAHAAVVAASGGSGG

SEQ ID NO: 567 - DNA, 1239 bp, synthetic construct
  misc_feature 1..1239: note = Variant of serine peptidase from Bacillus sinesaloumensis
  source 1..1239: mol_type = other DNA
atggcagatcaagctagtcaagctaatggaaaccaggacgtcattgaaggcgagctgatcgtttcagtggaaccgaagaacggtaaacctgatgtgagcattcaaagtgcacaatccgtaacagggcaggaagacgtccttaaatcgaaaggctttacgatcgttgataccttgcatgtagaggatagcagcgtcaagccactcgtctcgaagaatttcaataagaaagtggtggagaagatgggactggtgtatcttgttcaatactctccggaccagtttaaaagttccaacattgcgaagaaagaactcagaaaagaattgatggatctgggctttaaagtccgctatataagcgaaaattacaagatgatggcgatcgaaggtacagccactcttcaggcagtacaccctaaccaaaactggcattataatatgattaaagctccggaagcgtgggctattacgtctggatcctctagcgttaaagtagcagtcctggatacagggatcgaccataatcacccatccttggccaacttcgtgaatactaatcttggccggtcgtttgttggaggaaacaccatggatgttcaaggtcatggcacacatgttgctggcacgattgcatcttatgggagtgtaagcggagtgatgcagagtgcgacactgatcccggtcaaagtgctcgataattctggcagcgggtccctttacggtattacgcaaggcatattgtatgccgccgacatcgatgcggacgtcattaacatgtctctgggtggaggaggctataatcagagcatggatgaggctgttcaaacagcagttgctcagggaaccattgtagtagcagcgactggcaatgatggtgcatcgtcgatcagttatcctgctgcctacagcagcgtcattgcggtgggatctgtgacgtccaatcgtacacgatcctcgttttctaactatggatctgggcttgaagttatggcaccgggcagcaacatctacagtacgtatcctaattccagatatacatctttgagtggtacaagcatggctactccgcacgttgcgggcgtagctgggctcattcgcgcagccaacccagacatacttgtcgcgcaagcccgtcagattctgcgggataccgcgcaagaagcaggatcgttcacacagtacggctatggaatcgtcgatgctcatgccgccgttgttgctgcatccggtggtagcggcggc

SEQ ID NO: 568 - protein, 413 aa, synthetic construct
  REGION 1..413: note = Variant of serine peptidase from Bacillus sinesaloumensis
MADQASQANGNQDVIEGELIVSVEPKNGKPDVSIQSAQSVTGQEDVLKSKGFTIVDTLHVEDSSVKPLVSKNFNKKVVEKMGLVYLVQYSPDQFKSSNIAKKELRKELMDLGFKVRYISENYKMMAIEGTATLQAVHPNQNWHYNMIKAPEAWAITSGSSSVKVAVLDTGIDHNHPSLANFVNTNLGRSFVGGNTMDVQGHGTHVAGTIASYGSVSGVMQSATLIPVKVLDNSGSGSLYGITQGILYAADIDADVINMSLGGGGYNQSMDEAVQTAVAQGTIVVAATGNDGASSISYPAAYSSVIAVGSVTSNRTRSSFSNYGSGLEVMAPGSNIYSTYPNSRYTSLSGTSMATPHVAGVAGLIRAANPDILVAQARQILRDTAQEAGSFTQYGYGIVDAHAAVVAASGGSGG

SEQ ID NO: 569 - DNA, 1239 bp, synthetic construct
  misc_feature 1..1239: note = Variant of serine peptidase from Bacillus sinesaloumensis
  source 1..1239: mol_type = other DNA
atggcagatcaagctagtcaagctaatggaaaccaggacgtcattgaaggcgagctgatcgtttcagtggaaccgaagaacggtaaacctgatgtgagcattcaaagtgcacaatccgtaacagggcaggaagacgtccttaaatcgaaaggctttacgatcgttgataccttgcatgtagaggatagcagcgtcaagccactcgtctcgaagaatttcaataagaaagtggtggagaagatgggactggtgtatcttgttcaatactctccggaccagtttaaaagttccaacattgcgaagaaagaactcagaaaagaattgatggatctgggctttaaagtccgctatataagcgaaaattacaagatgatggcgatcgaaggtacagccactcttcagtatgtacaccctaaccaaaactggcattataatatgattaaagctccggaagcgtgggctattacgtctggatcctctagcgttaaagtagcagtcctggatacagggatcgaccataatcacccatccttggccaacttcgtgaatactaatcttggccggtcgtttgttggaggaaacaccatggatgttcaaggtcatggcacacatgttgctggcacgattgcatcttatgggagtgtaagcggagtgatgcagagtgcgacactgatcccggtcaaagtgctcgataattctggcagcgggtccctttacggtattacgcaaggcatattgtatgccgccgacatcgatgcggacgtcattaacatgtctctgggtggaggaggctataatcagagcatggatgaggctgttcaaacagcagttgctcagggaaccattgtagtagcagcgactggcaatgatggtgcatcgtcgatcagttatcctgctgcctacagcagcgtcattgcggtgggatctgtgacgtccaatcgtacacgatcctcgttttctaactatggatctgggcttgaagttatggcaccgggcagcaacatctacagtacgtatcctaattccagatatacatctttgagtggtacaagcatggctactccgcacgttgcgggcgtagctgggctcattcgcgcagccaacccagacatatctgtcgcgcaagcccgtcagattctgcgggataccgcgcaagaagcaggatcgttcacacagtacggctatggaatcgtcgatgctcatgccgccgttgttgctgcatccggtggtagcggcggc

SEQ ID NO: 570 - protein, 413 aa, synthetic construct
  REGION 1..413: note = Variant of serine peptidase from Bacillus sinesaloumensis
MADQASQANGNQDVIEGELIVSVEPKNGKPDVSIQSAQSVTGQEDVLKSKGFTIVDTLHVEDSSVKPLVSKNFNKKVVEKMGLVYLVQYSPDQFKSSNIAKKELRKELMDLGFKVRYISENYKMMAIEGTATLQYVHPNQNWHYNMIKAPEAWAITSGSSSVKVAVLDTGIDHNHPSLANFVNTNLGRSFVGGNTMDVQGHGTHVAGTIASYGSVSGVMQSATLIPVKVLDNSGSGSLYGITQGILYAADIDADVINMSLGGGGYNQSMDEAVQTAVAQGTIVVAATGNDGASSISYPAAYSSVIAVGSVTSNRTRSSFSNYGSGLEVMAPGSNIYSTYPNSRYTSLSGTSMATPHVAGVAGLIRAANPDISVAQARQILRDTAQEAGSFTQYGYGIVDAHAAVVAASGGSGG

SEQ ID NO: 571 - DNA, 1239 bp, synthetic construct
  misc_feature 1..1239: note = Variant of serine peptidase from Bacillus sinesaloumensis
  source 1..1239: mol_type = other DNA
atggcagatcaagctagtcaagctaatggaaaccaggacgtcattgaaggcgagctgatcgtttcagtggaaccgaagaacggtaaacctgatgtgagcattcaaagtgcacaatccgtaacagggcaggaagacgtccttaaatcgaaaggctttacgatcgttgataccttgcatgtagaggatagcagcgtcaagccactcgtctcgaagaatttcaataagaaagtggtggagaagatgggactggtgtatcttgttcaatactctccggaccagtttaaaagttccaacattgcgaagaaagaactcagaaaagaattgatggatctgggctttaaagtccgctatataagcgaaaattacaagatgatggcgatcgaaggtacagccactcttcaggcagtacaccctaaccaagtttggcattataatatgattaaagctccggaagcgtgggctattacgtctggatcctctagcgttaaagtagcagtcctggatacagggatcgaccataatcacccatccttggccaacttcgtgaatactaatcttggccggtcgtttgttggaggaaacaccatggatgttcaaggtcatggcacacatgttgctggcacgattgcatcttatgggagtgtaagcggagtgatgcagagtgcgacactgatcccggtcaaagtgctcgataattctggcagcgggtccctttacggtattacgcaaggcatattgtatgccgccgacatcgatgcggacgtcattaacatgtctctgggtggaggaggctataatcagagcatggatgaggctgttcaaacagcagttgctcagggaaccattgtagtagcagcgactggcaatgatggtgcatcgtcgatcagttatcctgctgcctacagcagcgtcattgcggtgggatctgtgacgtccaatcgtacacgatcctcgttttctaactatggatctgggcttgaagttatggcaccgggcagcaacatctacagtacgtatcctaattccagatatacatctttgagtggtacaagcatggctactccgcacgttgcgggcgtagctgggctcattcgcgcagccaacccagacatatctgtcgcgcaagcccgtcagattctgcgggataccgcgcaagaagcaggatcgttcacacagtacggctatggaatcgtcgatgctcatgccgccgttgttgctgcatccggtggtagcggcggc

SEQ ID NO: 572 - protein, 413 aa, synthetic construct
  REGION 1..413: note = Variant of serine peptidase from Bacillus sinesaloumensis
MADQASQANGNQDVIEGELIVSVEPKNGKPDVSIQSAQSVTGQEDVLKSKGFTIVDTLHVEDSSVKPLVSKNFNKKVVEKMGLVYLVQYSPDQFKSSNIAKKELRKELMDLGFKVRYISENYKMMAIEGTATLQAVHPNQVWHYNMIKAPEAWAITSGSSSVKVAVLDTGIDHNHPSLANFVNTNLGRSFVGGNTMDVQGHGTHVAGTIASYGSVSGVMQSATLIPVKVLDNSGSGSLYGITQGILYAADIDADVINMSLGGGGYNQSMDEAVQTAVAQGTIVVAATGNDGASSISYPAAYSSVIAVGSVTSNRTRSSFSNYGSGLEVMAPGSNIYSTYPNSRYTSLSGTSMATPHVAGVAGLIRAANPDISVAQARQILRDTAQEAGSFTQYGYGIVDAHAAVVAASGGSGG

SEQ ID NO: 573 - DNA, 1239 bp, synthetic construct
  misc_feature 1..1239: note = Variant of serine peptidase from Bacillus sinesaloumensis
  source 1..1239: mol_type = other DNA
atggcagatcaagctagtcaagctaatggaaaccaggacgtcattgaaggcgagctgatcgtttcagtggaaccgaagaacggtaaacctgatgtgagcattcaaagtgcacaatccgtaacagggcaggaagacgtccttaaatcgaaaggctttacgatcgttgataccttgcatgtagaggatagcagcgtcaagccactcgtctcgaagaatttcaataagaaagtggtggagaagatgggactggtgtatcttgttcaatactctccggaccagtttaaaagttccaacattgcgaagaaagaactcagaaaagaattgatggatctgggctttaaagtccgctatataagcgaaaattacaagatgatggcgatcgaaggtacagccactcttcaggcagtacaccctaaccaagcttggcattataatatgattaaagctccggaagcgtgggctattacgtctggatcctctagcgttaaagtagcagtcctggatacagggatcgaccataatcacccatccttggccaacttcgtgaatactaatcttggccggtcgtttgttggaggaaacaccatggatgttcaaggtcatggcacacatgttgctggcacgattgcatcttatgggagtgtaagcggagtgatgcagagtgcgacactgatcccggtcaaagtgctcgataattctggcagcgggtccctttacggtattacgcaaggcatattgtatgccgccgacatcgatgcggacgtcattaacatgtctctgggtggaggaggctataatcagagcatggatgaggctgttcaaacagcagttgctcagggaaccattgtagtagcagcgactggcaatgatggtgcatcgtcgatcagttatcctgctgcctacagcagcgtcattgcggtgggatctgtgacgtccaatcgtacacgatcctcgttttctaactatggatctgggcttgaagttatggcaccgggcagcaacatctacagtacgtatcctaattccagatatacatctttgagtggtacaagcatggctactccgcacgttgcgggcgtagctgggctcattcgcgcagccaacccagacatatctgtcgcgcaagcccgtcagattctgcgggataccgcgcaagaagcaggatcgttcacacagtacggctatggaatcgtcgatgctcatgccgccgttgttgctgcatccggtggtagcggcggc

SEQ ID NO: 574 - protein, 413 aa, synthetic construct
  REGION 1..413: note = Variant of serine peptidase from Bacillus sinesaloumensis
MADQASQANGNQDVIEGELIVSVEPKNGKPDVSIQSAQSVTGQEDVLKSKGFTIVDTLHVEDSSVKPLVSKNFNKKVVEKMGLVYLVQYSPDQFKSSNIAKKELRKELMDLGFKVRYISENYKMMAIEGTATLQAVHPNQAWHYNMIKAPEAWAITSGSSSVKVAVLDTGIDHNHPSLANFVNTNLGRSFVGGNTMDVQGHGTHVAGTIASYGSVSGVMQSATLIPVKVLDNSGSGSLYGITQGILYAADIDADVINMSLGGGGYNQSMDEAVQTAVAQGTIVVAATGNDGASSISYPAAYSSVIAVGSVTSNRTRSSFSNYGSGLEVMAPGSNIYSTYPNSRYTSLSGTSMATPHVAGVAGLIRAANPDISVAQARQILRDTAQEAGSFTQYGYGIVDAHAAVVAASGGSGG

SEQ ID NO: 575 - DNA, 1239 bp, synthetic construct
  misc_feature 1..1239: note = Variant of serine peptidase from Bacillus sinesaloumensis
  source 1..1239: mol_type = other DNA
atggcagatcaagctagtcaagctaatggaaaccaggacgtcattgaaggcgagctgatcgtttcagtggaaccgaagaacggtaaacctgatgtgagcattcaaagtgcacaatccgtaacagggcaggaagacgtccttaaatcgaaaggctttacgatcgttgataccttgcatgtagaggatagcagcgtcaagccactcgtctcgaagaatttcaataagaaagtggtggagaagatgggactggtgtatcttgttcaatactctccggaccagtttaaaagttccaacattgcgaagaaagaactcagaaaagaattgatggatctgggctttaaagtccgctatataagcgaaaattacaagatgatggcgatcgaaggtacaaggactcttcaggcagtacaccctaaccaaaactggcattataatatgattaaagctccggaagcgtgggctattacgtctggatcctctagcgttaaagtagcagtcctggatacagggatcgaccataatcacccatccttggccaacttcgtgaatactaatcttggccggtcgtttgttggaggaaacaccatggatgttcaaggtcatggcacacatgttgctggcacgattgcatcttatgggagtgtaagcggagtgatgcagagtgcgacactgatcccggtcaaagtgctcgataattctggcagcgggtccctttacggtattacgcaaggcatattgtatgccgccgacatcgatgcggacgtcattaacatgtctctgggtggaggaggctataatcagagcatggatgaggctgttcaaacagcagttgctcagggaaccattgtagtagcagcgactggcaatgatggtgcatcgtcgatcagttatcctgctgcctacagcagcgtcattgcggtgggatctgtgacgtccaatcgtacacgatcctcgttttctaactatggatctgggcttgaagttatggcaccgggcagcaacatctacagtacgtatcctaattccagatatacatctttgagtggtacaagcatggctactccgcacgttgcgggcgtagctgggctcattcgcgcagccaacccagacatatctgtcgcgcaagcccgtcagattctgcgggataccgcgcaagaagcaggatcgttcacacagtacggctatggaatcgtcgatgctcatgccgccgttgttgctgcatccggtggtagcggcggc

SEQ ID NO: 576 - protein, 413 aa, synthetic construct
  REGION 1..413: note = Variant of serine peptidase from Bacillus sinesaloumensis
MADQASQANGNQDVIEGELIVSVEPKNGKPDVSIQSAQSVTGQEDVLKSKGFTIVDTLHVEDSSVKPLVSKNFNKKVVEKMGLVYLVQYSPDQFKSSNIAKKELRKELMDLGFKVRYISENYKMMAIEGTRTLQAVHPNQNWHYNMIKAPEAWAITSGSSSVKVAVLDTGIDHNHPSLANFVNTNLGRSFVGGNTMDVQGHGTHVAGTIASYGSVSGVMQSATLIPVKVLDNSGSGSLYGITQGILYAADIDADVINMSLGGGGYNQSMDEAVQTAVAQGTIVVAATGNDGASSISYPAAYSSVIAVGSVTSNRTRSSFSNYGSGLEVMAPGSNIYSTYPNSRYTSLSGTSMATPHVAGVAGLIRAANPDISVAQARQILRDTAQEAGSFTQYGYGIVDAHAAVVAASGGSGG

SEQ ID NO: 577 - DNA, 1239 bp, synthetic construct
  misc_feature 1..1239: note = Variant of serine peptidase from Bacillus sinesaloumensis
  source 1..1239: mol_type = other DNA
atggcagatcaagctagtcaagctaatggaaaccaggacgtcattgaaggcgagctgatcgtttcagtggaaccgaagaacggtaaacctgatgtgagcattcaaagtgcacaatccgtaacagggcaggaagacgtccttaaatcgaaaggctttacgatcgttgataccttgcatgtagaggatagcagcgtcaagccactcgtctcgaagaatttcaataagaaagtggtggagaagatgggactggtgtatcttgttcaatactctccggaccagtttaaaagttccaacattgcgaagaaagaactcagaaaagaattgatggatctgggctttaaagtccgctatataagcgaaaattacaagatgatggcgatcgaaggtacagccactcttcaggaggtacaccctaaccaaaactggcattataatatgattaaagctccggaagcgtgggctattacgtctggatcctctagcgttaaagtagcagtcctggatacagggatcgaccataatcacccatccttggccaacttcgtgaatactaatcttggccggtcgtttgttggaggaaacaccatggatgttcaaggtcatggcacacatgttgctggcacgattgcatcttatgggagtgtaagcggagtgatgcagagtgcgacactgatcccggtcaaagtgctcgataattctggcagcgggtccctttacggtattacgcaaggcatattgtatgccgccgacatcgatgcggacgtcattaacatgtctctgggtggaggaggctataatcagagcatggatgaggctgttcaaacagcagttgctcagggaaccattgtagtagcagcgactggcaatgatggtgcatcgtcgatcagttatcctgctgcctacagcagcgtcattgcggtgggatctgtgacgtccaatcgtacacgatcctcgttttctaactatggatctgggcttgaagttatggcaccgggcagcaacatctacagtacgtatcctaattccagatatacatctttgagtggtacaagcatggctactccgcacgttgcgggcgtagctgggctcattcgcgcagccaacccagacatatctgtcgcgcaagcccgtcagattctgcgggataccgcgcaagaagcaggatcgttcacacagtacggctatggaatcgtcgatgctcatgccgccgttgttgctgcatccggtggtagcggcggc

SEQ ID NO: 578 - protein, 413 aa, synthetic construct
  REGION 1..413: note = Variant of serine peptidase from Bacillus sinesaloumensis
MADQASQANGNQDVIEGELIVSVEPKNGKPDVSIQSAQSVTGQEDVLKSKGFTIVDTLHVEDSSVKPLVSKNFNKKVVEKMGLVYLVQYSPDQFKSSNIAKKELRKELMDLGFKVRYISENYKMMAIEGTATLQEVHPNQNWHYNMIKAPEAWAITSGSSSVKVAVLDTGIDHNHPSLANFVNTNLGRSFVGGNTMDVQGHGTHVAGTIASYGSVSGVMQSATLIPVKVLDNSGSGSLYGITQGILYAADIDADVINMSLGGGGYNQSMDEAVQTAVAQGTIVVAATGNDGASSISYPAAYSSVIAVGSVTSNRTRSSFSNYGSGLEVMAPGSNIYSTYPNSRYTSLSGTSMATPHVAGVAGLIRAANPDISVAQARQILRDTAQEAGSFTQYGYGIVDAHAAVVAASGGSGG

SEQ ID NO: 579 - DNA, 1239 bp, synthetic construct
  misc_feature 1..1239: note = Variant of serine peptidase from Bacillus sinesaloumensis
  source 1..1239: mol_type = other DNA
atggcagatcaagctagtcaagctaatggaaaccaggacgtcattgaaggcgagctgatcgtttcagtggaaccgaagaacggtaaacctgatgtgagcattcaaagtgcacaatccgtaacagggcaggaagacgtccttaaatcgaaaggctttacgatcgttgataccttgcatgtagaggatagcagcgtcaagccactcgtctcgaagaatttcaataagaaagtggtggagaagatgggactggtgtatcttgttcaatactctccggaccagtttaaaagttccaacattgcgaagaaagaactcagaaaagaattgatggatctgggctttaaagtccgctatataagcgaaaattacaagatgatggcgatcgaaggtacagccactcttcaggcagtacaccctaaccaaaactggcattataatatgattaaagctccggaagcgtgggctattacgtctggatcctctagcgttaaagtagcagtcctggatacagggatcgaccataatcacccatccttggccaacttcgtgaatactaatcttggccggtcgtttgttggaggaaacaccatggatgttcaaggtcatggcacacatgttgctggcacgattgcatcttatgggagtgtaagcggagtgatgcagagtgcgacactgatcccggtcaaagtgctcgataattctggcagcgggtccctttacggtattacgcaaggcatattgtatgccgccgacatcgatgcggacgtcattaacatgtctctgggtggaggaggctataatcagagcatggatgaggctgttcaaacagcagttgctcagggaaccattgtagtagcagcgactggcaatgatggtgcatcgtcgatcagttatcctgctgcctacagcagcgtcattgcggtgggatctgtgacgtccaatcgtacacgatcctcgttttctaactatggatatgggcttgaagttatggcaccgggcagcaacatctacagtacgtatcctaattccagatatacatctttgagtggtacaagcatggctactccgcacgttgcgggcgtagctgggctcattcgcgcagccaacccagacatatctgtcgcgcaagcccgtcagattctgcgggataccgcgcaagaagcaggatcgttcacacagtacggctatggaatcgtcgatgctcatgccgccgttgttgctgcatccggtggtagcggcggc

SEQ ID NO: 580 - protein, 413 aa, synthetic construct
  REGION 1..413: note = Variant of serine peptidase from Bacillus sinesaloumensis
MADQASQANGNQDVIEGELIVSVEPKNGKPDVSIQSAQSVTGQEDVLKSKGFTIVDTLHVEDSSVKPLVSKNFNKKVVEKMGLVYLVQYSPDQFKSSNIAKKELRKELMDLGFKVRYISENYKMMAIEGTATLQAVHPNQNWHYNMIKAPEAWAITSGSSSVKVAVLDTGIDHNHPSLANFVNTNLGRSFVGGNTMDVQGHGTHVAGTIASYGSVSGVMQSATLIPVKVLDNSGSGSLYGITQGILYAADIDADVINMSLGGGGYNQSMDEAVQTAVAQGTIVVAATGNDGASSISYPAAYSSVIAVGSVTSNRTRSSFSNYGYGLEVMAPGSNIYSTYPNSRYTSLSGTSMATPHVAGVAGLIRAANPDISVAQARQILRDTAQEAGSFTQYGYGIVDAHAAVVAASGGSGG

SEQ ID NO: 581 - DNA, 1239 bp, synthetic construct
  misc_feature 1..1239: note = Variant of serine peptidase from Bacillus sinesaloumensis
  source 1..1239: mol_type = other DNA
atggcagatcaagctagtcaagctaatggaaaccaggacgtcattgaaggcgagctgatcgtttcagtggaaccgaagaacggtaaacctgatgtgagcattcaaagtgcacaatccgtaacagggcaggaagacgtccttaaatcgaaaggctttacgatcgttgataccttgcatgtagaggatagcagcgtcaagccactcgtctcgaagaatttcaataagaaagtggtggagaagatgggactggtgtatcttgttcaatactctccggaccagtttaaaagttccaacattgcgaagaaagaactcagaaaagaattgatggatctgggctttaaagtccgctatataagcgaaaattacaagatgatggcgatcgaaggtacagccactcttcaggcagtacaccctaaccaaaactggcattataatatgattaaagctccggaagcgtgggctattacgtctggatcctctagcgttaaagtagcagtcctggatacagggatcgaccataatcacccatccttggccaacttcgtgaatactaatcttggccggtcgtttgttggcggaaacaccatggatgttcaaggtcatggcacacatgttgctggcacgattgcatcttatgggagtgtaagcggagtgatgcagagtgcgacactgatcccggtcaaagtgctcgataattctggcagcgggtccctttacggtattacgcaaggcatattgtatgccgccgacatcgatgcggacgtcattaacatgtctctgggtggaggaggctataatcagagcatggatgaggctgttcaaacagcagttgctcagggaaccattgtagtagcagcgactggcaatgatggtgcatcgtcgatcagttatcctgctgcctacagcagcgtcattgcggtgggatctgtggactccaatcgtacaaagtcctcgttttctaactatggatctgggcttgaagttatggcaccgggcagcaacatctacagtacgtatcctaattccagatatacatctttgagtggtacaagcatggctactccgcacgttgcgggcgtagctgggctcattcgcgcagccaacccaggcatatctgtcgcgcaagcccgtcagattctgcgggataccgcgcaagaagcaggatcgttcacacagtacggctatggaatcgtcgatgctcatgccgccgttgttgctgcatccggtggtagcggcggc

SEQ ID NO: 582 - protein, 413 aa, synthetic construct
  REGION 1..413: note = Variant of serine peptidase from Bacillus sinesaloumensis
MADQASQANGNQDVIEGELIVSVEPKNGKPDVSIQSAQSVTGQEDVLKSKGFTIVDTLHVEDSSVKPLVSKNFNKKVVEKMGLVYLVQYSPDQFKSSNIAKKELRKELMDLGFKVRYISENYKMMAIEGTATLQAVHPNQNWHYNMIKAPEAWAITSGSSSVKVAVLDTGIDHNHPSLANFVNTNLGRSFVGGNTMDVQGHGTHVAGTIASYGSVSGVMQSATLIPVKVLDNSGSGSLYGITQGILYAADIDADVINMSLGGGGYNQSMDEAVQTAVAQGTIVVAATGNDGASSISYPAAYSSVIAVGSVDSNRTKSSFSNYGSGLEVMAPGSNIYSTYPNSRYTSLSGTSMATPHVAGVAGLIRAANPGISVAQARQILRDTAQEAGSFTQYGYGIVDAHAAVVAASGGSGG

SEQ ID NO: 583 - DNA, 1239 bp, synthetic construct
  misc_feature 1..1239: note = Variant of serine peptidase from Bacillus sinesaloumensis
  source 1..1239: mol_type = other DNA
atggcagatcaagctagtcaagctaatggaaaccaggacgtcattgaaggcgagctgatcgtttcagtggaaccgaagaacggtaaacctgatgtgagcattcaaagtgcacaatccgtaacagggcaggaagacgtccttaaatcgaaaggctttacgatcgttgataccttgcatgtagaggatagcagcgtcaagccactcgtctcgaagaatttcaataagaaagtggtggagaagatgggactggtgtatcttgttcaatactctccggaccagtttaaaagttccaacgttgcgaagaaagaactcagaaaagaattgatggatctgggctttaaagtccgctatataagcgaaaattacaagatgatggcgatcgaaggtacagccactcttcaggcagtacaccctaaccaaaactggcattataatatgattaaagctccggaagcgtgggctattacgtctggatcctctagcgttaaagtagcagtcctggatacagggatcgaccataatcacccatccttggccaacttcgtgaatactaatcttggccggtcgtttgttggaggtaacaccatggatgttcaaggtcatggcacacatgttgctggcacgattgcatcttatgggagtgtaagcggagtgatgcagagtgcgacactgatcccggtcaaagtgctcgataattctggcagcgggtccctttacggtattacgcaaggcatattgtatgccgccgacatcgatgcggacgtcattaacatgtctctgggtggaggaggctataatcagagcatggatgaggctgttcaaacagcagttgctcagggaaccattgtagtagcagcgactggcaatgatggtgcatcgtcgatcagttatcctgctgcctacagcagcgtcattgcggtgggatctgtgacgtccaatcgtacacgatcctcgttttctaactatggatctgggcttgaagttatggcaccgggcagcaacatctacagtacgtatcctaactccagatatacatctttgagtggtacaagcatggctactccgcacgttgcgggcgtagctgggctcattcgcgcagccaacccagacatatctgtcgcgcaagcccgtcagattctgcgggataccgcgcaagaagcaggatcgtttacacagtacggctatggaatcgtcgatgctcatgccgccgttgtggctgcatccggtggtagcggcggc

SEQ ID NO: 584 - protein, 413 aa, synthetic construct
  REGION 1..413: note = Variant of serine peptidase from Bacillus sinesaloumensis
MADQASQANGNQDVIEGELIVSVEPKNGKPDVSIQSAQSVTGQEDVLKSKGFTIVDTLHVEDSSVKPLVSKNFNKKVVEKMGLVYLVQYSPDQFKSSNVAKKELRKELMDLGFKVRYISENYKMMAIEGTATLQAVHPNQNWHYNMIKAPEAWAITSGSSSVKVAVLDTGIDHNHPSLANFVNTNLGRSFVGGNTMDVQGHGTHVAGTIASYGSVSGVMQSATLIPVKVLDNSGSGSLYGITQGILYAADIDADVINMSLGGGGYNQSMDEAVQTAVAQGTIVVAATGNDGASSISYPAAYSSVIAVGSVTSNRTRSSFSNYGSGLEVMAPGSNIYSTYPNSRYTSLSGTSMATPHVAGVAGLIRAANPDISVAQARQILRDTAQEAGSFTQYGYGIVDAHAAVVAASGGSGG

SEQ ID NO: 585 - DNA, 1239 bp, synthetic construct
  misc_feature 1..1239: note = Variant of serine peptidase from Bacillus sinesaloumensis
  source 1..1239: mol_type = other DNA
atggcagatcaagctagtcaagctaatggaaaccaggacgtcattgaaggcgagctgatcgtttcagtggaaccgaagaacggtaaacctgatgtgagcattcaaagtgcacaatccgtaacagggcaggaagacgtccttaaatcgaaaggctttacgatcgttgataccttgcatgtagaggatagcagcgtcaagccactcgtctcgaagaatttcaataagaaagtggtggagaagatgggactggtgtatcttgttcaatactctccggaccagtttaaaagttccaacattgcgaagaaagaactcagaaaagaattgatggatctgggctttaaagtccgctatataagcgaaaattacaagatgatggcgatcgaaggtacagccactcttcaggcagtacaccctaaccaaaactggcattataatatgattaaagctccggaagcgtgggctattacgtctggatcctctagcgttaaagtagcagtcctggatacagggatcgaccataatcacccatccttggccaacttcgtgaatactaatcttggccggtcgtttgttggaggtaacaccatggatgttcaaggtcatggcacacatgttgctggcacgattgcatcttatgggagtgtaagcggagtgatgcagagtgcgacactgatcccggtcaaagtgctcgataattctggcagcgggtccctttacggtattacgcaaggcatattgtatgccgccgacatcgatgcggacgtcattaacatgtctctgggtggaggaggctataatcagagcatggatgaggctgttcaaacagcagttaaccagggaaccattgtagtagcagcgactggcaatgatggtgcatcgtcgatcagttatcctgctgcctacagcagcgtcattgcggtgggatctgtgacgtccaatcgtacacgatcctcgttttctaactatggatctgggcttgaagttatggcaccgggcagcaacatctacagtacgtatcctaattccagatatacatctttgagtggtacaagcatggctactccgcacgttgcgggcgtagctgggctcattcgcgcagccaacccagacatatctgtcgcgcaagcccgtcagattctgcgggataccgcgcaagaagcaggatcgttcacacagtacggctatggaatcgtcgatgctcatgccgccgttgttgctgcatccggtggtagcggcggc

SEQ ID NO: 586 - protein, 413 aa, synthetic construct
  REGION 1..413: note = Variant of serine peptidase from Bacillus sinesaloumensis
MADQASQANGNQDVIEGELIVSVEPKNGKPDVSIQSAQSVTGQEDVLKSKGFTIVDTLHVEDSSVKPLVSKNFNKKVVEKMGLVYLVQYSPDQFKSSNIAKKELRKELMDLGFKVRYISENYKMMAIEGTATLQAVHPNQNWHYNMIKAPEAWAITSGSSSVKVAVLDTGIDHNHPSLANFVNTNLGRSFVGGNTMDVQGHGTHVAGTIASYGSVSGVMQSATLIPVKVLDNSGSGSLYGITQGILYAADIDADVINMSLGGGGYNQSMDEAVQTAVNQGTIVVAATGNDGASSISYPAAYSSVIAVGSVTSNRTRSSFSNYGSGLEVMAPGSNIYSTYPNSRYTSLSGTSMATPHVAGVAGLIRAANPDISVAQARQILRDTAQEAGSFTQYGYGIVDAHAAVVAASGGSGG

SEQ ID NO: 587 - DNA, 1239 bp, synthetic construct
  misc_feature 1..1239: note = Variant of serine peptidase from Bacillus sinesaloumensis
  source 1..1239: mol_type = other DNA
atggcagatcaagctagtcaagctaatggaaaccaggacgtcattgaaggcgagctgatcgtttcagtggaaccgaagaacggtaaacctgatgtgagcattcaaagtgcacaatccgtaacagggcaggaagacgtccttaaatcgaaaggctttacgatcgttgataccttgcatgtagaggatagcagcgtcaagccactcgtctcgaagaatttcaataagaaagtggtggagaagatgggactggtgtatcttgttcaatactctccggaccagtttaaaagttccaacattgcgaagaaagaactcagaaaagaattgatggatctgggctttaaagtccgctatataagcgaaaattacaagatgatggcgatcgaaggtacagccactcttcaggcagtacaccctaaccaaaactggcattataatatgattaaagctccggaagcgtgggctattacgtctggatcctctagcgttaaagtagcagtcctggatacagggatcgaccataatcacccatccttggccaacttcgtgaatactaatcttggccggtcgtttgttggaggaaacaccatggatgttcaaggtcatggcacacatgttgctggcacgattgcatcttatgggagtgtaagcggagtgatgcagagtgcgacactgatcccggtcaaagtgctcgataattctggcagcgggtccctttacggtattacgcaaggcatattgtatgccgccgacatcgatgcggacgtcattaacatgtctctgggtggaggaggctataatcagagcatggatgaggctgttcaaacagcagttgctcagggaaccattgtagtagcagcgactggcaatgatggtgcatcgtcgatcagttatcctgctgcctacagcagcgtcattgcggtgggatctgtgacgtccaatcgtactcgatcctcgttttctaactatggatctgggcttgaagttatggcaccgggcagcaacatctacagtacgtatcctaattccagatatacatctttgagtggtacaagcatggctactccgcacgttgcgggcgtagctgggctcattcgcgcagccaacccagacatatctgtcgcgcaagcccgtcagattctgcgggataccgcgcaagaagcaggatcgttcacacagtacggctatggaatcgtcgatgctcatgccgccgttcaagctgcatccggtggtagcggcggc

SEQ ID NO: 588 - protein, 413 aa, synthetic construct
  REGION 1..413: note = Variant of serine peptidase from Bacillus sinesaloumensis
MADQASQANGNQDVIEGELIVSVEPKNGKPDVSIQSAQSVTGQEDVLKSKGFTIVDTLHVEDSSVKPLVSKNFNKKVVEKMGLVYLVQYSPDQFKSSNIAKKELRKELMDLGFKVRYISENYKMMAIEGTATLQAVHPNQNWHYNMIKAPEAWAITSGSSSVKVAVLDTGIDHNHPSLANFVNTNLGRSFVGGNTMDVQGHGTHVAGTIASYGSVSGVMQSATLIPVKVLDNSGSGSLYGITQGILYAADIDADVINMSLGGGGYNQSMDEAVQTAVAQGTIVVAATGNDGASSISYPAAYSSVIAVGSVTSNRTRSSFSNYGSGLEVMAPGSNIYSTYPNSRYTSLSGTSMATPHVAGVAGLIRAANPDISVAQARQILRDTAQEAGSFTQYGYGIVDAHAAVQAASGGSGG

SEQ ID NO: 589 - DNA, 1239 bp, synthetic construct
  misc_feature 1..1239: note = Variant of serine peptidase from Bacillus sinesaloumensis
  source 1..1239: mol_type = other DNA
atggcagatcaagctagtcaagctaatggaaaccaggacgtcattgaaggcgagctgatcgtttcagtggaaccgaagaacggtaaacctgatgtgagcattcaaagtgcacaatccgtaacagggcaggaagacgtccttaaatcgaaaggctttacgatcgttgataccttgcatgtagaggatagcagcgtcaagccactcgtctcgaagaatttcaataagaaagtggtggagaagatgggactggtgtatcttgttcaatactctccggaccagtttaaaagttccaacattgcgaagaaagaactcagaaaagaattgatggatctgggctttaaagtccgctatataagcgaaaattacaagatgatggcgatcgaaggtacagccactcttcaggcagtacaccctaaccaaaactggcattataatatgattaaagctccggaagcgtgggctattacgtctggatcctctagcgttaaagtagcagtcctggatacagggatcgaccataatcacccatccttggccaacttcgtgaatactaatctgggccggtcgtttgttggaggaaacaccatggatgtccaaggtcatggcacacatgttgctggcacgattgcatcttatgggagtgtaagcggagtgatgcagagtgcgacactgatcccggtcaaagtgctcgataattctggcagcgggtccctttacggtattacgcaaggcatattgtatgccgccgacatcgatgcggacgtcattaacatgtctctgggtggaggaggctacaatcagagcatggatgaggctgttcaaacagcagttgctcagggaaccattgtagtagcagcgactggcaatgatggtgcatcgtcgatcagttatcctgctgcctacagcagcgtcattgcggtgggatctgtggactccaatcgtacacgttcctcgttttctaactatggatctgggcttgaagttatggcaccgggcagcaacatctacagtacgtatcctaataacagatatacatctttgagtggtacaagcatggctactccgcacgttgcgggcgtagctgggctcattcgcgcagccaacccaggcatatctgtcgcgcaagcccgtcagattctgcgggataccgcgcaagaagcaggatcgttcacacaatacggctatggaatcgtcgatgctcatgccgccgttgttgctgcatccggtggtagcggcggc

SEQ ID NO: 590 - protein, 413 aa, synthetic construct
  REGION 1..413: note = Variant of serine peptidase from Bacillus sinesaloumensis
MADQASQANGNQDVIEGELIVSVEPKNGKPDVSIQSAQSVTGQEDVLKSKGFTIVDTLHVEDSSVKPLVSKNFNKKVVEKMGLVYLVQYSPDQFKSSNIAKKELRKELMDLGFKVRYISENYKMMAIEGTATLQAVHPNQNWHYNMIKAPEAWAITSGSSSVKVAVLDTGIDHNHPSLANFVNTNLGRSFVGGNTMDVQGHGTHVAGTIASYGSVSGVMQSATLIPVKVLDNSGSGSLYGITQGILYAADIDADVINMSLGGGGYNQSMDEAVQTAVAQGTIVVAATGNDGASSISYPAAYSSVIAVGSVDSNRTRSSFSNYGSGLEVMAPGSNIYSTYPNNRYTSLSGTSMATPHVAGVAGLIRAANPGISVAQARQILRDTAQEAGSFTQYGYGIVDAHAAVVAASGGSGG

SEQ ID NO: 591 - DNA, 1239 bp, synthetic construct
  misc_feature 1..1239: note = Variant of serine peptidase from Bacillus sinesaloumensis
  source 1..1239: mol_type = other DNA
atggcagatcaagctagtcaagctaatggaaaccaggacgtcattgaaggcgagctgatcgtttcagtggaaccgaagaacggtaaacctgatgtgagcattcaaagtgcacaatccgtaacagggcaggaagacgtccttaaatcgaaaggctttacgatcgttgataccttgcatgtagaggatagcagcgtcaagccactcgtctcgaagaatttcaataagaaagtggtggagaagatgggactggtgtatcttgttcaatactctccggaccagtttaaaagttccaacattgcgaagaaagaactcagaaaagaattgatggatctgggctttaaagtccgctatataagcgaaaattacaagatgatggcgatcgaaggtacagccactcttcaggcagtacaccctaaccaacaatggcattataatatgattaaagctccggaagcgtgggctattacgtctggatcctctagcgttaaagtagcagtcctggatacagggatcgaccataatcacccatccttggccaacttcgtgaatactaatcttggccggtcgtttgttggaggaaacaccatggatggccaaggtcatggcacacatgttgctggcacgattgcatcttatgggagtgtaagcggagtgatgcagagtgcgacactgatcccggtcaaagtgctcgataattctggcagcgggtccctttacggtattacgcaaggcatattgtatgccgccgacatcgatgcggacgtcattaacatgtctctgggtggaggaggctacaatcagagcatggatgaggctgttcaaacagcagttgctcagggaaccattgtagtagcagcgactggcaatgatggtgcatcgtcgatcagttatcctgctgcctacagcagcgtcattgcggtgggatctgtgacgtccaatcgtacacgttcctcgttttctaactatggatctgggcttgaagttatggcaccgggcagcaacatctacagtacgtatcctaattccagatatacatctttgagtggtacaagcatggctactccgcacgttgcgggcgtagctgggctcattcgcgcagccaacccagacatatctgtcgcgcaagcccgtcagattctgcgggataccgcgcaagaagcaggatcgttcacacaatacggctatggaatcgtcgatgctcatgccgccgttgttgctgcatccggtggtagcggcggc

SEQ ID NO: 592 - protein, 413 aa, synthetic construct
  REGION 1..413: note = Variant of serine peptidase from Bacillus sinesaloumensis
MADQASQANGNQDVIEGELIVSVEPKNGKPDVSIQSAQSVTGQEDVLKSKGFTIVDTLHVEDSSVKPLVSKNFNKKVVEKMGLVYLVQYSPDQFKSSNIAKKELRKELMDLGFKVRYISENYKMMAIEGTATLQAVHPNQQWHYNMIKAPEAWAITSGSSSVKVAVLDTGIDHNHPSLANFVNTNLGRSFVGGNTMDGQGHGTHVAGTIASYGSVSGVMQSATLIPVKVLDNSGSGSLYGITQGILYAADIDADVINMSLGGGGYNQSMDEAVQTAVAQGTIVVAATGNDGASSISYPAAYSSVIAVGSVTSNRTRSSFSNYGSGLEVMAPGSNIYSTYPNSRYTSLSGTSMATPHVAGVAGLIRAANPDISVAQARQILRDTAQEAGSFTQYGYGIVDAHAAVVAASGGSGG

SEQ ID NO: 593 - DNA, 1239 bp, synthetic construct
  misc_feature 1..1239: note = Variant of serine peptidase from Bacillus sinesaloumensis
  source 1..1239: mol_type = other DNA
atggcagatcaagctagtcaagctaatggaaaccaggacgtcattgaaggcgagctgatcgtttcagtggaaccgaagaacggtaaacctgatgtgagcattcaaagtgcacaatccgtaacagggcaggaagacgtccttaaatcgaaaggctttacgatcgttgataccttgcatgtagaggatagcagcgtcaagccactcgtctcgaagaatttcaataagaaagtggtggagaagatgggactggtgtatcttgttcaatactctccggaccagtttaaaagttccaacattgcgaagaaagaactcagaaaagaattgatggatctgggctttaaagtccgctatataagcgaaaattacaagatgatggcgatcgaaggtacagccactcttcaggcagtacaccctaaccaaaactggcattataatatgattaaagctccggaagcgtgggctattacgtctggatcctctagcgttaaagtagcagtcctggatacagggatcgaccataatcacccatccttggccaacttcgtgaatactaatcttggccggtcgtttgttggaggaaacaccatggatgtccaaggtcatggcacacatgttgctggcacgattgcatcttatgggagtgtaagcggagtgatgcagagtgcgacactgatcccggtcaaagtgctcgataattctggcagcgggtccctttacggtattacgcaaggcatattgtatgccgccgacatcgatgcggacgtcattaacatgtctctgggtggaggaggctataatcagagcatggatgaggctgttcaaacagcagttgctcagggaaccattgtagtagcagcgactggcaatgatggtgcatcgtcgatcagttatcctgctgcctacagcagcgtcattgcggtgggatctgtggactccaatcgtacacgttcctcgttttctaactatggatctgggcttgaagttatggcaccgggcagcaacatctacagtacgtatcctaataacagatatacatctttgagtggtacaagcatggctactccgcacgttgcgggcgtagctgggctcattcgcgcagccaacccagacatatctgtcgcgcaagcccgtcagattctgcgggataccgcgcaagaagcaggatcgttcacacaatacggctatggaatcgtcgatgctcatgccgccgttgttgctgcatccggtggtagcggcggc

SEQ ID NO: 594 - protein, 413 aa, synthetic construct
  REGION 1..413: note = Variant of serine peptidase from Bacillus sinesaloumensis
MADQASQANGNQDVIEGELIVSVEPKNGKPDVSIQSAQSVTGQEDVLKSKGFTIVDTLHVEDSSVKPLVSKNFNKKVVEKMGLVYLVQYSPDQFKSSNIAKKELRKELMDLGFKVRYISENYKMMAIEGTATLQAVHPNQNWHYNMIKAPEAWAITSGSSSVKVAVLDTGIDHNHPSLANFVNTNLGRSFVGGNTMDVQGHGTHVAGTIASYGSVSGVMQSATLIPVKVLDNSGSGSLYGITQGILYAADIDADVINMSLGGGGYNQSMDEAVQTAVAQGTIVVAATGNDGASSISYPAAYSSVIAVGSVDSNRTRSSFSNYGSGLEVMAPGSNIYSTYPNNRYTSLSGTSMATPHVAGVAGLIRAANPDISVAQARQILRDTAQEAGSFTQYGYGIVDAHAAVVAASGGSGG

SEQ ID NO: 595 - DNA, 1239 bp, synthetic construct
  misc_feature 1..1239: note = Variant of serine peptidase from Bacillus sinesaloumensis
  source 1..1239: mol_type = other DNA
atggcagatcaagctagtcaagctaatggaaaccaggacgtcattgaaggcgagctgatcgtttcagtggaaccgaagaacggtaaacctgatgtgagcattcaaagtgcacaatccgtaacagggcaggaagacgtccttaaatcgaaaggctttacgatcgttgataccttgcatgtagaggatagcagcgtcaagccactcgtctcgaagaatttcaataagaaagtggtggagaagatgggactggtgtatcttgttcaatactctccggaccagtttaaaagttccaacattgcgaagaaagaactcagaaaagaattgatggatctgggctttaaagtccgctatataagcgaaaattacaagatgatggcgatcgaaggtacagccactcttcaggcagtacaccctaaccaacaatggcattataatatgattaaagctccggaagcgtgggctattacgtctggatcctctagcgttaaagtagcagtcctggatacagggatcgaccataatcacccatccttggccaacttcgtgaatactaatcttggccggtcgtttgttggaggaaacaccatggatgtccaaggtcatggcacacatgttgctggcacgattgcatcttatgggagtgtaagcggagtgatgcagagtgcgacactgatcccggtcaaagtgctcgataattctggcagcgggtccctttacggtattacgcaaggcatattgtatgccgccgacatcgatgcggacgtcattaacatgtctctgggtggaggaggctataatcagagcatggatgaggctgttcaaacagcagttgctcagggaaccattgtagtagcagcgactggcaatgatggtgcatcgtcgatcagttatcctgctgcctacagcagcgtcattgcggtgggatctgtggactccaatcgtacacgttcctcgttttctaactatggatctgggcttgaagttatggcaccgggcagcaacatctacagtacgtatcctaattccagatatacatctttgagtggtacaagcatggctactccgcacgttgcgggcgtagctgggctcattcgcgcagccaacccagacatatctgtcgcgcaagcccgtcagattctgcgggataccgcgcaagaagcaggatcgttcacacagtacggctatggaatcgtcgatgctcatgccgccgttgttgctgcatccggtggtagcggcggc

SEQ ID NO: 596 - protein, 413 aa, synthetic construct
  REGION 1..413: note = Variant of serine peptidase from Bacillus sinesaloumensis
MADQASQANGNQDVIEGELIVSVEPKNGKPDVSIQSAQSVTGQEDVLKSKGFTIVDTLHVEDSSVKPLVSKNFNKKVVEKMGLVYLVQYSPDQFKSSNIAKKELRKELMDLGFKVRYISENYKMMAIEGTATLQAVHPNQQWHYNMIKAPEAWAITSGSSSVKVAVLDTGIDHNHPSLANFVNTNLGRSFVGGNTMDVQGHGTHVAGTIASYGSVSGVMQSATLIPVKVLDNSGSGSLYGITQGILYAADIDADVINMSLGGGGYNQSMDEAVQTAVAQGTIVVAATGNDGASSISYPAAYSSVIAVGSVDSNRTRSSFSNYGSGLEVMAPGSNIYSTYPNSRYTSLSGTSMATPHVAGVAGLIRAANPDISVAQARQILRDTAQEAGSFTQYGYGIVDAHAAVVAASGGSGG

SEQ ID NO: 597 - DNA, 1239 bp, synthetic construct
  misc_feature 1..1239: note = Variant of serine peptidase from Bacillus sinesaloumensis
  source 1..1239: mol_type = other DNA
atggcagatcaagctagtcaagctaatggaaaccaggacgtcattgaaggcgagctgatcgtttcagtggaaccgaagaacggtaaacctgatgtgagcattcaaagtgcacaatccgtaacagggcaggaagacgtccttaaatcgaaaggctttacgatcgttgataccttgcatgtagaggatagcagcgtcaagccactcgtctcgaagaatttcaataagaaagtggtggagaagatgggactggtgtatcttgttcaatactctccggaccagtttaaaagttccaacattgcgaagaaagaactcagaaaagaattgatggatctgggctttaaagtccgctatataagcgaaaattacaagatgatggcgatcgaaggtacagccactcttcaggcagtacaccctaaccaaaactggcattataatatgattaaagctccggaagcgtgggctattacgtctggatcctctagcgttaaagtagcagtcctggatacagggatcgaccataatcacccatccttggccaacttcgtgaatactaatcttggccggtcgtttgttggaggaaacaccatggatgttcaaggtcatggcacacatgttgctggcacgattgcatcttatgggagtgtaagcggagtgatgcagagtgcgacactgatcccggtcaaagtgctcgataattctggcagcgggtccctttacggtattacgcaaggcatattgtatgccgccgacatcgatgcggacgtcattaacatgtctctgggtggaggaggctacaatcagagcatggatgaggctgttcaaacagcagttgctaaaggaaccattgtagtagcagcgactggcaatgatggtgcatcgtcgatcagttatcctgctgcctacagcagcgtcattgcggtgggatctgtggactccaatcgtacacgttcctcgttttctaactatggatctgggcttgaagttatggcaccgggcagcaacatctacagtacgtatcctaatagcagatatacatctttgagtggtacaagcatggctactccgcacgttgcgggcgtagctgggctcattcgcgcagccaacccagacatatctgtcgcgcaagcccatcagattctgcgggataccgcgcaagaagcaggatcgttcacatactacggctatggaatcgtcgatgctcatgccgccgttgttgctgcatccggtggtagcggcggc

SEQ ID NO: 598 - protein, 413 aa, synthetic construct
  REGION 1..413: note = Variant of serine peptidase from Bacillus sinesaloumensis
MADQASQANGNQDVIEGELIVSVEPKNGKPDVSIQSAQSVTGQEDVLKSKGFTIVDTLHVEDSSVKPLVSKNFNKKVVEKMGLVYLVQYSPDQFKSSNIAKKELRKELMDLGFKVRYISENYKMMAIEGTATLQAVHPNQNWHYNMIKAPEAWAITSGSSSVKVAVLDTGIDHNHPSLANFVNTNLGRSFVGGNTMDVQGHGTHVAGTIASYGSVSGVMQSATLIPVKVLDNSGSGSLYGITQGILYAADIDADVINMSLGGGGYNQSMDEAVQTAVAKGTIVVAATGNDGASSISYPAAYSSVIAVGSVDSNRTRSSFSNYGSGLEVMAPGSNIYSTYPNSRYTSLSGTSMATPHVAGVAGLIRAANPDISVAQAHQILRDTAQEAGSFTYYGYGIVDAHAAVVAASGGSGG

SEQ ID NO: 599 - DNA, 1239 bp, synthetic construct
  misc_feature 1..1239: note = Variant of serine peptidase from Bacillus sinesaloumensis
  source 1..1239: mol_type = other DNA
atggcagatcaagctagtcaagctaatggaaaccaggacgtcattgaaggcgagctgatcgtttcagtggaaccgaagaacggtaaacctgatgtgagcattcaaagtgcacaatccgtaacagggcaggaagacgtccttaaatcgaaaggctttacgatcgttgataccttgcatgtagaggatagcagcgtcaagccactcgtctcgaagaatttcaataagaaagtggtggagaagatgggactggtgtatcttgttcaatactctccggaccagtttaaaagttccaacattgcgaagaaagaactcagaaaagaattgatggatctgggctttaaagtccgctatataagcgaaaattacaagatgatggcgatcgaaggtacagccactcttcaggcagtacaccctaaccaaaactggcattataatatgattaaagctccggaagcgtgggctattacgtctggatcctctagcgttaaagtagcagtcctggatacagggatcgaccataatcacccatccttggccaacttcgtgaatactaattacggccggtcgtttgttggaggaaacaccatggatggccaaggtcatggcacacatgttgctggcacgattgcatcttatgggagtgtaagcggagtgatgcagagtgcgacactgatcccggtcaaagtgctcgataattctggcagcgggtccctttacggtattacgcaaggcatattgtatgccgccgacatcgatgcggacgtcattaacatgtctctgggtggaggaggctacaatcagagcatggatgaggctgttcaaacagcagttgctcaaggaaccattgtagtagcagcgactggcaatgatggtgcatcgtcgatcagttatcctgctgcctacagcagcgtcattgcggtgggatctgtggactccaatcgtacacgttcctcgttttctaactatggatctgggcttgaagttatggcaccgggcagcaacatctacagtacgtatcctaataacagatatacatctttgagtggtacaagcatggctactccgcacgttgcgggcgtagctgggctcattcgcgcagccaacccaggcatatctgtcgcgcaagcccgtcagattctgcgggataccgcgcaagaagcaggatcgttcacatactacggctatggaatcgtcgatgctcatgccgccgttgttgctgcatccggtggtagcggcggc

SEQ ID NO: 600 - protein, 413 aa, synthetic construct
  REGION 1..413: note = Variant of serine peptidase from Bacillus sinesaloumensis
MADQASQANGNQDVIEGELIVSVEPKNGKPDVSIQSAQSVTGQEDVLKSKGFTIVDTLHVEDSSVKPLVSKNFNKKVVEKMGLVYLVQYSPDQFKSSNIAKKELRKELMDLGFKVRYISENYKMMAIEGTATLQAVHPNQNWHYNMIKAPEAWAITSGSSSVKVAVLDTGIDHNHPSLANFVNTNYGRSFVGGNTMDGQGHGTHVAGTIASYGSVSGVMQSATLIPVKVLDNSGSGSLYGITQGILYAADIDADVINMSLGGGGYNQSMDEAVQTAVAQGTIVVAATGNDGASSISYPAAYSSVIAVGSVDSNRTRSSFSNYGSGLEVMAPGSNIYSTYPNNRYTSLSGTSMATPHVAGVAGLIRAANPGISVAQARQILRDTAQEAGSFTYYGYGIVDAHAAVVAASGGSGG

SEQ ID NO: 601 - DNA, 1239 bp, synthetic construct
  misc_feature 1..1239: note = Variant of serine peptidase from Bacillus sinesaloumensis
  source 1..1239: mol_type = other DNA
atggcagatcaagctagtcaagctaatggaaaccaggacgtcattgaaggcgagctgatcgtttcagtggaaccgaagaacggtaaacctgatgtgagcattcaaagtgcacaatccgtaacagggcaggaagacgtccttaaatcgaaaggctttacgatcgttgataccttgcatgtagaggatagcagcgtcaagccactcgtctcgaagaatttcaataagaaagtggtggagaagatgggactggtgtatcttgttcaatactctccggaccagtttaaaagttccaacattgcgaagaaagaactcagaaaagaattgatggatctgggctttaaagtccgctatataagcgaaaattacaagatgatggcgatcgaaggtacagccactcttcaggcagtacaccctaaccaacaatggcattataatatgattaaagctccggaagcgtgggctattacgtctggatcctctagcgttaaagtagcagtcctggatacagggatcgaccataatcacccatccttggccaacttcgtgaatactaatctgggccggtcgtttgttggaggaaacaccatggatgttcaaggtcatggcacacatgttgctggcacgattgcatcttatgggagtgtaagcggagtgatgcagagtgcgacactgatcccggtcaaagtgctcgataattctggcagcgggtccctttacggtattacgcaaggcatattgtatgccgccgacatcgatgcggacgtcattaacatgtctctgggtggaggaggctacaatcagagcatggatgaggctgttcaaacagcagttgctcaaggaaccattgtagtagcagcgactggcaatgatggtgcatcgtcgatcagttatcctgctgcctacagcagcgtcattgcggtgggatctgtgacgtccaatcgtacacgatcctcgttttctaactatggatctgggcttgaagttatggcaccgggcagcaacatctacagtacgtatcctaattccagatatacatctttgagtggtacaagcatggctactccgcacgttgcgggcgtagctgggctcattcgcgcagccaacccagacatatctgtcgcgcaagcccgtcagattctgcgggataccgcgcaagaagcaggatcgttcacatactacggctatggaatcgtcgatgctcatgccgccgttgttgctgcatccggtggtagcggcggc

SEQ ID NO: 602 - protein, 413 aa, synthetic construct
  REGION 1..413: note = Variant of serine peptidase from Bacillus sinesaloumensis
MADQASQANGNQDVIEGELIVSVEPKNGKPDVSIQSAQSVTGQEDVLKSKGFTIVDTLHVEDSSVKPLVSKNFNKKVVEKMGLVYLVQYSPDQFKSSNIAKKELRKELMDLGFKVRYISENYKMMAIEGTATLQAVHPNQQWHYNMIKAPEAWAITSGSSSVKVAVLDTGIDHNHPSLANFVNTNLGRSFVGGNTMDVQGHGTHVAGTIASYGSVSGVMQSATLIPVKVLDNSGSGSLYGITQGILYAADIDADVINMSLGGGGYNQSMDEAVQTAVAQGTIVVAATGNDGASSISYPAAYSSVIAVGSVTSNRTRSSFSNYGSGLEVMAPGSNIYSTYPNSRYTSLSGTSMATPHVAGVAGLIRAANPDISVAQARQILRDTAQEAGSFTYYGYGIVDAHAAVVAASGGSGG

SEQ ID NO: 603 - DNA, 1239 bp, synthetic construct
  misc_feature 1..1239: note = Variant of serine peptidase from Bacillus sinesaloumensis
  source 1..1239: mol_type = other DNA
atggcagatcaagctagtcaagctaatggaaaccaggacgtcattgaaggcgagctgatcgtttcagtggaaccgaagaacggtaaacctgatgtgagcattcaaagtgcacaatccgtaacagggcaggaagacgtccttaaatcgaaaggctttacgatcgttgataccttgcatgtagaggatagcagcgtcaagccactcgtctcgaagaatttcaataagaaagtggtggagaagatgggactggtgtatcttgttcaatactctccggaccagtttaaaagttccaacattgcgaagaaagaactcagaaaagaattgatggatctgggctttaaagtccgctatataagcgaaaattacaagatgatggcgatcgaaggtacagccactcttcaggcagtacaccctaaccaaaactggcattataatatgattaaagctccggaagcgtgggctattacgtctggatcctctagcgttaaagtagcagtcctggatacagggatcgaccataatcacccatccttggccaacttcgtgaatactaatcttggccggtcgtttgttggcggaaacaccatggatgttcaaggtcatggcacacatgttgctggcacgattgcatcttatgggagtgtaagcggagtgatgcagagtgcgacactgatcccggtcaaagtgctcgataattctggcagcgggtccctttacggtattacgcaaggcatattgtatgccgccgacatcgatgcggacgtcattaacatgtctctgggtggaggaggctacaatcagagcatggatgaggctgttcaaacagcagttgctcagggaaccattgtagtagcagcgactggcaatgatggtgcatcgtcgatcagttatcctgctgcctacagcagcgtcattgcggtgggatctgtggactccaatcgtacacgttcctcgttttctaactatggatctgggcttgaagttatggcaccgggcagcaacatctacagtacgtatcctaattccagatatacatctttgagtggtacaagcatggctactccgcacgttgcgggcgtagctgggctcattcgcgcagccaacccaggcatatctgtcgcgcaagcccgtcagattctgcgggataccgcgcaagaagcaggatcgttcacatactacggctatggaatcgtcgatgctcatgccgccgttgttgctgcatccggtggtagcggcggc

SEQ ID NO: 604 - protein, 413 aa, synthetic construct
  REGION 1..413: note = Variant of serine peptidase from Bacillus sinesaloumensis
MADQASQANGNQDVIEGELIVSVEPKNGKPDVSIQSAQSVTGQEDVLKSKGFTIVDTLHVEDSSVKPLVSKNFNKKVVEKMGLVYLVQYSPDQFKSSNIAKKELRKELMDLGFKVRYISENYKMMAIEGTATLQAVHPNQNWHYNMIKAPEAWAITSGSSSVKVAVLDTGIDHNHPSLANFVNTNLGRSFVGGNTMDVQGHGTHVAGTIASYGSVSGVMQSATLIPVKVLDNSGSGSLYGITQGILYAADIDADVINMSLGGGGYNQSMDEAVQTAVAQGTIVVAATGNDGASSISYPAAYSSVIAVGSVDSNRTRSSFSNYGSGLEVMAPGSNIYSTYPNSRYTSLSGTSMATPHVAGVAGLIRAANPGISVAQARQILRDTAQEAGSFTYYGYGIVDAHAAVVAASGGSGG

SEQ ID NO: 605 - DNA, 1239 bp, synthetic construct
  misc_feature 1..1239: note = Variant of serine peptidase from Bacillus sinesaloumensis
  source 1..1239: mol_type = other DNA
atggcagatcaagctagtcaagctaatggaaaccaggacgtcattgaaggcgagctgatcgtttcagtggaaccgaagaacggtaaacctgatgtgagcattcaaagtgcacaatccgtaacagggcaggaagacgtccttaaatcgaaaggctttacgatcgttgataccttgcatgtagaggatagcagcgtcaagccactcgtctcgaagaatttcaataagaaagtggtggagaagatgggactggtgtatcttgttcaatactctccggaccagtttaaaagttccaacattgcgaagaaagaactcagaaaagaattgatggatctgggctttaaagtccgctatataagcgaaaattacaagatgatggcgatcgaaggtacagccactcttcaggcagtacaccctaaccaacaatggcattataatatgattaaagctccggaagcgtgggctattacgtctggatcctctagcgttaaagtagcagtcctggatacagggatcgaccataatcacccatccttggccaacttcgtgaatactaatcttggccggtcgtttgttggaggaaacaccatggatgttcaaggtcatggcacacatgttgctggcacgattgcatcttatgggagtgtaagcggagtgatgcagagtgcgacactgatcccggtcaaagtgctcgataattctggcagcgggtccctttacggtattacgcaaggcatattgtatgccgccgacatcgatgcggacgtcattaacatgtctctgggtggaggaggctacaatcagagcatggatgaggctgttcaaacagcagttgctcagggaaccattgtagtagcagcgactggcaatgatggtgcatcgtcgatcagttatcctgctgcctacagcagcgtcattgcggtgggatctgtggactccaatcgtacacgttcctcgttttctaactatggatctgggcttgaagttatggcaccgggcagcaacatctacagtacgtatcctaattccagatatacatctttgagtggtacaagcatggctactccgcacgttgcgggcgtagctgggctcattcgcgcagccaacccagacatatctgtcgcgcaagcccgtcagattctgcgggataccgcgcaagaagcaggatcgttcacatactacggctatggaatcgtcgatgctcatgccgccgttgttgctgcatccggtggtagcggcggc

SEQ ID NO: 606 - protein, 413 aa, synthetic construct
  REGION 1..413: note = Variant of serine peptidase from Bacillus sinesaloumensis
MADQASQANGNQDVIEGELIVSVEPKNGKPDVSIQSAQSVTGQEDVLKSKGFTIVDTLHVEDSSVKPLVSKNFNKKVVEKMGLVYLVQYSPDQFKSSNIAKKELRKELMDLGFKVRYISENYKMMAIEGTATLQAVHPNQQWHYNMIKAPEAWAITSGSSSVKVAVLDTGIDHNHPSLANFVNTNLGRSFVGGNTMDVQGHGTHVAGTIASYGSVSGVMQSATLIPVKVLDNSGSGSLYGITQGILYAADIDADVINMSLGGGGYNQSMDEAVQTAVAQGTIVVAATGNDGASSISYPAAYSSVIAVGSVDSNRTRSSFSNYGSGLEVMAPGSNIYSTYPNSRYTSLSGTSMATPHVAGVAGLIRAANPDISVAQARQILRDTAQEAGSFTYYGYGIVDAHAAVVAASGGSGG

SEQ ID NO: 607 - DNA, 1239 bp, synthetic construct
  misc_feature 1..1239: note = Variant of serine peptidase from Bacillus sinesaloumensis
  source 1..1239: mol_type = other DNA
atggcagatcaagctagtcaagctaatggaaaccaggacgtcattgaaggcgagctgatcgtttcagtggaaccgaagaacggtaaacctgatgtgagcattcaaagtgcacaatccgtaacagggcaggaagacgtccttaaatcgaaaggctttacgatcgttgataccttgcatgtagaggatagcagcgtcaagccactcgtctcgaagaatttcaataagaaagtggtggagaagatgggactggtgtatcttgttcaatactctccggaccagtttaaaagttccaacattgcgaagaaagaactcagaaaagaattgatggatctgggctttaaagtccgctatataagcgaaaattacaagatgatggcgatcgaaggtacagccactcttcaggcagtacaccctaaccaaaactggcattataatatgattaaagctccggaagcgtgggctattacgtctggatcctctagcgttaaagtagcagtcctggatacagggatcgaccataatcacccatccttggccaacttcgtgaatactaatcttggccggtcgtttgttggcggaaacaccatggatgttcaaggtcatggcacacatgttgctggcacgattgcatcttatgggagtgtaagcggagtgatgcagagtgcgacactgatcccggtcaaagtgctcgataattctggcagcgggtccctttacggtattacgcaaggcatattgtatgccgccgacatcgatgcggacgtcattaacatgtctctgggtggaggaggctacaatcagagcatggatgaggctgttcaaacagcagttgctcagggaaccattgtagtagcagcgactggcaatgatggtgcatcgtcgatcagttatcctgctgcctacagcagcgtcattgcggtgggatctgtggactccaatcgtacacgttcctcgttttctaactatggatctgggcttgaagttatggcaccgggcagcaacatctacagtacgtatcctaattccagatatacatctttgagtggtacaagcatggctactccgcacgttgcgggcgtagctgggctcattcgcgcagccaacccaggcatatctgtcgcgcaagcccgtcagattctgcgggataccgcgcaagaagcaggatcgttcacacagtacggctatggaatcgtcgatgctcatgccgccgttgttgctgcatccggtggtagcggcggc

SEQ ID NO: 608 - protein, 413 aa, synthetic construct
  REGION 1..413: note = Variant of serine peptidase from Bacillus sinesaloumensis
MADQASQANGNQDVIEGELIVSVEPKNGKPDVSIQSAQSVTGQEDVLKSKGFTIVDTLHVEDSSVKPLVSKNFNKKVVEKMGLVYLVQYSPDQFKSSNIAKKELRKELMDLGFKVRYISENYKMMAIEGTATLQAVHPNQNWHYNMIKAPEAWAITSGSSSVKVAVLDTGIDHNHPSLANFVNTNLGRSFVGGNTMDVQGHGTHVAGTIASYGSVSGVMQSATLIPVKVLDNSGSGSLYGITQGILYAADIDADVINMSLGGGGYNQSMDEAVQTAVAQGTIVVAATGNDGASSISYPAAYSSVIAVGSVDSNRTRSSFSNYGSGLEVMAPGSNIYSTYPNSRYTSLSGTSMATPHVAGVAGLIRAANPGISVAQARQILRDTAQEAGSFTQYGYGIVDAHAAVVAASGGSGG

SEQ ID NO: 609 - DNA, 1239 bp, synthetic construct
  misc_feature 1..1239: note = Variant of serine peptidase from Bacillus sinesaloumensis
  source 1..1239: mol_type = other DNA
atggcagatcaagctagtcaagctaatggaaaccaggacgtcattgaaggcgagctgatcgtttcagtggaaccgaagaacggtaaacctgatgtgagcattcaaagtgcacaatccgtaacagggcaggaagacgtccttaaatcgaaaggctttacgatcgttgataccttgcatgtagaggatagcagcgtcaagccactcgtctcgaagaatttcaataagaaagtggtggagaagatgggactggtgtatcttgttcaatactctccggaccagtttaaaagttccaacattgcgaagaaagaactcagaaaagaattgatggatctgggctttaaagtccgctatataagcgaaaattacaagatgatggcgatcgaaggtacagccactcttcaggcagtacaccctaaccaaaactggcattataatatgattaaagctccggaagcgtgggctattacgtctggatcctctagcgttaaagtagcagtcctggatacagggatcgaccataatcacccatccttggccaacttcgtgaatactaatctgggccggtcgtttgttggaggaaacaccatggatgttcaaggtcatggcacacatgttgctggcacgattgcatcttatgggagtgtaagcggagtgatgcagagtgcgacactgatcccggtcaaagtgctcgataattctggcagcgggtccctttacggtattacgcaaggcatattgtatgccgccgacatcgatgcggacgtcattaacatgtctctgggtggaggaggctacaatcagagcatggatgaggctgttcaaacagcagttgctcagggaaccattgtagtagcagcgactggcaatgatggtgcatcgtcgatcagttatcctgctgcctacagcagcgtcattgcggtgggatctgtggactccaatcgtacaaagtcctcgttttctaactatggatctgggcttgaagttatggcaccgggcagcaacatctacagtacgtatcctaattccagatatacatctttgagtggtacaagcatggctactccgcacgttgcgggcgtagctgggctcattcgcgcagccaacccagacatatctgtcgcgcaagcccgtcagattctgcgggataccgcgcaagaagcaggatcgttcacatactacggctatggaatcgtcgatgctcatgccgccgttgttgctgcatccggtggtagcggcggc

SEQ ID NO: 610 - protein, 413 aa, synthetic construct
  REGION 1..413: note = Variant of serine peptidase from Bacillus sinesaloumensis
MADQASQANGNQDVIEGELIVSVEPKNGKPDVSIQSAQSVTGQEDVLKSKGFTIVDTLHVEDSSVKPLVSKNFNKKVVEKMGLVYLVQYSPDQFKSSNIAKKELRKELMDLGFKVRYISENYKMMAIEGTATLQAVHPNQNWHYNMIKAPEAWAITSGSSSVKVAVLDTGIDHNHPSLANFVNTNLGRSFVGGNTMDVQGHGTHVAGTIASYGSVSGVMQSATLIPVKVLDNSGSGSLYGITQGILYAADIDADVINMSLGGGGYNQSMDEAVQTAVAQGTIVVAATGNDGASSISYPAAYSSVIAVGSVDSNRTKSSFSNYGSGLEVMAPGSNIYSTYPNSRYTSLSGTSMATPHVAGVAGLIRAANPDISVAQARQILRDTAQEAGSFTYYGYGIVDAHAAVVAASGGSGG

SEQ ID NO: 611 - DNA, 1239 bp, synthetic construct
  misc_feature 1..1239: note = Variant of serine peptidase from Bacillus sinesaloumensis
  source 1..1239: mol_type = other DNA
atggcagatcaagctagtcaagctaatggaaaccaggacgtcattgaaggcgagctgatcgtttcagtggaaccgaagaacggtaaacctgatgtgagcattcaaagtgcacaatccgtaacagggcaggaagacgtccttaaatcgaaaggctttacgatcgttgataccttgcatgtagaggatagcagcgtcaagccactcgtctcgaagaatttcaataagaaagtggtggagaagatgggactggtgtatcttgttcaatactctccggaccagtttaaaagttccaacattgcgaagaaagaactcagaaaagaattgatggatctgggctttaaagtccgctatataagcgaaaattacaagatgatggcgatcgaaggtacagccactcttcaggcagtacaccctaaccaaaactggcattataatatgattaaagctccggaagcgtgggctattacgtctggatcctctagcgttaaagtagcagtcctggatacagggatcgaccataatcacccatccttggccaacttcgtgaatactaatcttggccggtcgtttgttggaggaaacaccatggatgttcaaggtcatggcacacatgttgctggcacgattgcatcttatgggagtgtaagcggagtgatgcagagtgcgacactgatcccggtcaaagtgctcgataattctggcagcgggtccctttacggtattacgcaaggcatattgtatgccgccgacatcgatgcggacgtcattaacatgtctctgggtggaggaggcggtaatcagagcatggatgaggctgttcaaacagcagttgctcagggaaccattgtagtagcagcgactggcaatgatggtgcatcgtcgatcagttatcctgctgcctacagcagcgtcattgcggtgggatctgtggactccaatcgtacacgttcctcgttttctaactatggatctgggcttgaagttatggcaccgggcagcaacatctacagtacgtatcctaattccagatatacatctttgagtggtacaagcatggctactccgcacgttgcgggcgtagctgggctcattcgcgcagccaacccagacatatctgtcgcgcaagcccgtcagattctgcgggataccgcgcaagaagcaggatcgttcacatactacggctatggaatcgtcgatgctcatgccgccgttgttgctgcatccggtggtagcggcggc

SEQ ID NO: 612 - protein, 413 aa, synthetic construct
  REGION 1..413: note = Variant of serine peptidase from Bacillus sinesaloumensis
MADQASQANGNQDVIEGELIVSVEPKNGKPDVSIQSAQSVTGQEDVLKSKGFTIVDTLHVEDSSVKPLVSKNFNKKVVEKMGLVYLVQYSPDQFKSSNIAKKELRKELMDLGFKVRYISENYKMMAIEGTATLQAVHPNQNWHYNMIKAPEAWAITSGSSSVKVAVLDTGIDHNHPSLANFVNTNLGRSFVGGNTMDVQGHGTHVAGTIASYGSVSGVMQSATLIPVKVLDNSGSGSLYGITQGILYAADIDADVINMSLGGGGGNQSMDEAVQTAVAQGTIVVAATGNDGASSISYPAAYSSVIAVGSVDSNRTRSSFSNYGSGLEVMAPGSNIYSTYPNSRYTSLSGTSMATPHVAGVAGLIRAANPDISVAQARQILRDTAQEAGSFTYYGYGIVDAHAAVVAASGGSGG

SEQ ID NO: 613 - DNA, 1239 bp, synthetic construct
  misc_feature 1..1239: note = Variant of serine peptidase from Bacillus sinesaloumensis
  source 1..1239: mol_type = other DNA
atggcagatcaagctagtcaagctaatggaaaccaggacgtcattgaaggcgagctgatcgtttcagtggaaccgaagaacggtaaacctgatgtgagcattcaaagtgcacaatccgtaacagggcaggaagacgtccttaaatcgaaaggctttacgatcgttgataccttgcatgtagaggatagcagcgtcaagccactcgtctcgaagaatttcaataagaaagtggtggagaagatgggactggtgtatcttgttcaatactctccggaccagtttaaaagttccaacattgcgaagaaagaactcagaaaagaattgatggatctgggctttaaagtccgctatataagcgaaaattacaagatgatggcgatcgaaggtacagccactcttcaggcagtacaccctaaccaacaatggcattataatatgattaaagctccggaagcgtgggctattacgtctggatcctctagcgttaaagtagcagtcctggatacagggatcgaccataatcacccatccttggccaacttcgtgaatactaatcttggccggtcgtttgttgacggaaacaccatggatgttcaaggtcatggcacacatgttgctggcacgattgcatcttatgggagtgtaagcggagtgatgcagagtgcgacactgatcccggtcaaagtgctcgataattctggcagcgggtccctttacggtattacgcaaggcatattgtatgccgccgacatcgatgcggacgtcattaacatgtctctgggtggaggaggctacaatcagagcatggatgaggctgttcaaacagcagttgctcaaggaaccattgtagtagcagcgactggcaatgatggtgcatcgtcgatcagttatcctgctgcctacagcagcgtcattgcggtgggatctgtgacgtccaatcgtacacgatcctcgttttctaactatggatctgggcttgaagttatggcaccgggcagcaacatctacagtacgtatcctaattccagatatacatctttgagtggtacaagcatggctactccgcacgttgcgggcgtagctgggctcattcgcgcagccaacccagacatatctgtcgcgcaagcccgtcagattctgcgggataccgcgcaagaagcaggatcgttcacacagtacggctatggaatcgtcgatgctcatgccgccgttgttgctgcatccggtggtagcggcggc

SEQ ID NO: 614 - protein, 413 aa, synthetic construct
  REGION 1..413: note = Variant of serine peptidase from Bacillus sinesaloumensis
MADQASQANGNQDVIEGELIVSVEPKNGKPDVSIQSAQSVTGQEDVLKSKGFTIVDTLHVEDSSVKPLVSKNFNKKVVEKMGLVYLVQYSPDQFKSSNIAKKELRKELMDLGFKVRYISENYKMMAIEGTATLQAVHPNQQWHYNMIKAPEAWAITSGSSSVKVAVLDTGIDHNHPSLANFVNTNLGRSFVDGNTMDVQGHGTHVAGTIASYGSVSGVMQSATLIPVKVLDNSGSGSLYGITQGILYAADIDADVINMSLGGGGYNQSMDEAVQTAVAQGTIVVAATGNDGASSISYPAAYSSVIAVGSVTSNRTRSSFSNYGSGLEVMAPGSNIYSTYPNSRYTSLSGTSMATPHVAGVAGLIRAANPDISVAQARQILRDTAQEAGSFTQYGYGIVDAHAAVVAASGGSGG

SEQ ID NO: 615 - DNA, 1239 bp, synthetic construct
  misc_feature 1..1239: note = Variant of serine peptidase from Bacillus sinesaloumensis
  source 1..1239: mol_type = other DNA
atggcagatcaagctagtcaagctaatggaaaccaggacgtcattgaaggcgagctgatcgtttcagtggaaccgaagaacggtaaacctgatgtgagcattcaaagtgcacaatccgtaacagggcaggaagacgtccttaaatcgaaaggctttacgatcgttgataccttgcatgtagaggatagcagcgtcaagccactcgtctcgaagaatttcaataagaaagtggtggagaagatgggactggtgtatcttgttcaatactctccggaccagtttaaaagttccaacattgcgaagaaagaactcagaaaagaattgatggatctgggctttaaagtccgctatataagcgaaaattacaagatgatggcgatcgaaggtacagccactcttcaggcagtacaccctaaccaaaactggcattataatatgattaaagctccggaagcgtgggctattacgtctggatcctctagcgttaaagtagcagtcctggatacagggatcgaccataatcacccatccttggccaacttcgtgaatactaatcttggccggtcgtttgttggaggaaacaccatggatgttcaaggtcatggcacacatgttgctggcacgattgcatcttatgggagtgtaagcggagtgatgcagagtgcgacactgatcccggtcaaagtgctcgataattctggcagcgggtccctttacggtattacgcaaggcatattgtatgccgccgacatcgatgcggacgtcattaacatgtctctgggtggaggaggctataatcagagcatggatgaggctgttcaaacagcagttgctcagggaaccattgtagtagcagcgactggcaatgatggtgcatcgtcgatcagttatcctgctgcctacagcagcgtcattgcggtgggatctgtggactccaatcgtacacgttcctcgttttctaactatggatctgggcttgaagttatggcaccgggcagcaacatctacagtacgtatcctaattccagatatacatctttgagtggtacaagcatggctactccgcacgttgcgggcgtagctgggctcattcgcgcagccaacccagacatatctgtcgcgcaagcccgtcagattctgcgggataccgcgcaagaagcaggatcgttcacacagtacggctatggaatcgtcgatgctcatgccgccgttgttgctgcatccggtggtagcggcggc

SEQ ID NO: 616 - protein, 413 aa, synthetic construct
  REGION 1..413: note = Variant of serine peptidase from Bacillus sinesaloumensis
MADQASQANGNQDVIEGELIVSVEPKNGKPDVSIQSAQSVTGQEDVLKSKGFTIVDTLHVEDSSVKPLVSKNFNKKVVEKMGLVYLVQYSPDQFKSSNIAKKELRKELMDLGFKVRYISENYKMMAIEGTATLQAVHPNQNWHYNMIKAPEAWAITSGSSSVKVAVLDTGIDHNHPSLANFVNTNLGRSFVGGNTMDVQGHGTHVAGTIASYGSVSGVMQSATLIPVKVLDNSGSGSLYGITQGILYAADIDADVINMSLGGGGYNQSMDEAVQTAVAQGTIVVAATGNDGASSISYPAAYSSVIAVGSVDSNRTRSSFSNYGSGLEVMAPGSNIYSTYPNSRYTSLSGTSMATPHVAGVAGLIRAANPDISVAQARQILRDTAQEAGSFTQYGYGIVDAHAAVVAASGGSGG

SEQ ID NO: 617 - DNA, 1239 bp, synthetic construct
  misc_feature 1..1239: note = Variant of serine peptidase from Bacillus sinesaloumensis
  source 1..1239: mol_type = other DNA
atggcagatcaagctagtcaagctaatggaaaccaggacgtcattgaaggcgagctgatcgtttcagtggaaccgaagaacggtaaacctgatgtgagcattcaaagtgcacaatccgtaacagggcaggaagacgtccttaaatcgaaaggctttacgatcgttgataccttgcatgtagaggatagcagcgtcaagccactcgtctcgaagaatttcaataagaaagtggtggagaagatgggactggtgtatcttgttcaatactctccggaccagtttaaaagttccaacattgcgaagaaagaactcagaaaagaattgatggatctgggctttaaagtccgctatataagcgaaaattacaagatgatggcgatcgaaggtacagccactcttcaggcagtacaccctaaccaacaatggcattataatatgattaaagctccggaagcgtgggctattacgtctggatcctctagcgttaaagtagcagtcctggatacagggatcgaccataatcacccatccttggccaacttcgtgaatactaatcttggccggtcgtttgttggaggaaacaccatggatgttcaaggtcatggcacacatgttgctggcacgattgcatcttatgggagtgtaagcggagtgatgcagagtgcgacactgatcccggtcaaagtgctcgataattctggcagcgggtccctttacggtattacgcaaggcatattgtatgccgccgacatcgatgcggacgtcattaacatgtctctgggtggaggaggcggtaatcagagcatggatgaggctgttcaaacagcagttgctcagggaaccattgtagtagcagcgactggcaatgatggtgcatcgtcgatcagttatcctgctgcctacagcagcgtcattgcggtgggatctgtggactccaatcgtacacgttcctcgttttctaactatggatctgggcttgaagttatggcaccgggcagcaacatctacagtacgtatcctaattccagatatacatctttgagtggtacaagcatggctactccgcacgttgcgggcgtagctgggctcattcgcgcagccaacccagacatatctgtcgcgcaagcccgtcagattctgcgggataccgcgcaagaagcaggatcgttcacatactacggctatggaatcgtcgatgctcatgccgccgttgttgctgcatccggtggtagcggcggc

SEQ ID NO: 618 - protein, 413 aa, synthetic construct
  REGION 1..413: note = Variant of serine peptidase from Bacillus sinesaloumensis
MADQASQANGNQDVIEGELIVSVEPKNGKPDVSIQSAQSVTGQEDVLKSKGFTIVDTLHVEDSSVKPLVSKNFNKKVVEKMGLVYLVQYSPDQFKSSNIAKKELRKELMDLGFKVRYISENYKMMAIEGTATLQAVHPNQQWHYNMIKAPEAWAITSGSSSVKVAVLDTGIDHNHPSLANFVNTNLGRSFVGGNTMDVQGHGTHVAGTIASYGSVSGVMQSATLIPVKVLDNSGSGSLYGITQGILYAADIDADVINMSLGGGGGNQSMDEAVQTAVAQGTIVVAATGNDGASSISYPAAYSSVIAVGSVDSNRTRSSFSNYGSGLEVMAPGSNIYSTYPNSRYTSLSGTSMATPHVAGVAGLIRAANPDISVAQARQILRDTAQEAGSFTYYGYGIVDAHAAVVAASGGSGG

SEQ ID NO: 619 - DNA, 1239 bp, synthetic construct
  misc_feature 1..1239: note = Variant of serine peptidase from Bacillus sinesaloumensis
  source 1..1239: mol_type = other DNA
atggcagatcaagctagtcaagctaatggaaaccaggacgtcattgaaggcgagctgatcgtttcagtggaaccgaagaacggtaaacctgatgtgagcattcaaagtgcacaatccgtaacagggcaggaagacgtccttaaatcgaaaggctttacgatcgttgataccttgcatgtagaggatagcagcgtcaagccactcgtctcgaagaatttcaataagaaagtggtggagaagatgggactggtgtatcttgttcaatactctccggaccagtttaaaagttccaacattgcgaagaaagaactcagaaaagaattgatggatctgggctttaaagtccgctatataagcgaaaattacaagatgatggcgatcgaaggtacagccactcttcaggcagtacaccctaaccaaaactggcattataatatgattaaagctccggaagcgtgggctattacgtctggatcctctagcgttaaagtagcagtcctggatacagggatcgaccataatcacccatccttggccaacttcgtgaatactaatcttggccggtcgtttgttgacggaaacaccatggatgttcaaggtcatggcacacatgttgctggcacgattgcatcttatgggagtgtaagcggagtgatgcagagtgcgacactgatcccggtcaaagtgctcgataattctggcagcgggtccctttacggtattacgcaaggcatattgtatgccgccgacatcgatgcggacgtcattaacatgtctctgggtggaggaggctacaatcagagcatggatgaggctgttcaaacagcagttgctcagggaaccattgtagtagcagcgactggcaatgatggtgcatcgtcgatcagttatcctgctgcctacagcagcgtcattgcggtgggatctgtggactccaatcgtacacgttcctcgttttctaactatggatctgggcttgaagttatggcaccgggcagcaacatctacagtacgtatcctaatagcagatatacatctttgagtggtacaagcatggctactccgcacgttgcgggcgtagctgggctcattcgcgcagccaacccaggcatatctgtcgcgcaagcccgtcagattctgcgggataccgcgcaagaagcaggatcgttcacatactacggctatggaatcgtcgatgctcatgccgccgttgttgctgcatccggtggtagcggcggc

SEQ ID NO: 620 - protein, 413 aa, synthetic construct
  REGION 1..413: note = Variant of serine peptidase from Bacillus sinesaloumensis
MADQASQANGNQDVIEGELIVSVEPKNGKPDVSIQSAQSVTGQEDVLKSKGFTIVDTLHVEDSSVKPLVSKNFNKKVVEKMGLVYLVQYSPDQFKSSNIAKKELRKELMDLGFKVRYISENYKMMAIEGTATLQAVHPNQNWHYNMIKAPEAWAITSGSSSVKVAVLDTGIDHNHPSLANFVNTNLGRSFVDGNTMDVQGHGTHVAGTIASYGSVSGVMQSATLIPVKVLDNSGSGSLYGITQGILYAADIDADVINMSLGGGGYNQSMDEAVQTAVAQGTIVVAATGNDGASSISYPAAYSSVIAVGSVDSNRTRSSFSNYGSGLEVMAPGSNIYSTYPNSRYTSLSGTSMATPHVAGVAGLIRAANPGISVAQARQILRDTAQEAGSFTYYGYGIVDAHAAVVAASGGSGG

SEQ ID NO: 621 - DNA, 1239 bp, synthetic construct
  misc_feature 1..1239: note = Variant of serine peptidase from Bacillus sinesaloumensis
  source 1..1239: mol_type = other DNA
atggcagatcaagctagtcaagctaatggaaaccaggacgtcattgaaggcgagctgatcgtttcagtggaaccgaagaacggtaaacctgatgtgagcattcaaagtgcacaatccgtaacagggcaggaagacgtccttaaatcgaaaggctttacgatcgttgataccttgcatgtagaggatagcagcgtcaagccactcgtctcgaagaatttcaataagaaagtggtggagaagatgggactggtgtatcttgttcaatactctccggaccagtttaaaagttccaacattgcgaagaaagaactcagaaaagaattgatggatctgggctttaaagtccgctatataagcgaaaattacaagatgatggcgatcgaaggtacagccactcttcaggcagtacaccctaaccaaaactggcattataatatgattaaagctccggaagcgtgggctattacgtctggatcctctagcgttaaagtagcagtcctggatacagggatcgaccataatcacccatccttggccaacttcgtgaatactaatctgggccggtcgtttgttggcggaaacaccatggatggccaaggtcatggcacacatgttgctggcacgattgcatcttatgggagtgtaagcggagtgatgcagagtgcgacactgatcccggtcaaagtgctcgataattctggcagcgggtccctttacggtattacgcaaggcatattgtatgccgccgacatcgatgcggacgtcattaacatgtctctgggtggaggaggcggtaatcagagcatggatgaggctgttcaaacagcagttgctcaaggaaccattgtagtagcagcgactggcaatgatggtgcatcgtcgatcagttatcctgctgcctacagcagcgtcattgcggtgggatctgtggactccaatcgtacaaagtcctcgttttctaactatggatctgggcttgaagttatggcaccgggcagcaacatctacagtacgtatcctaatagcagatatacatctttgagtggtacaagcatggctactccgcacgttgcgggcgtagctgggctcattcgcgcagccaacccaggcatatctgtcgcgcaagcccgtcagattctgcgggataccgcgcaagaagcaggatcgttcacacagtacggctatggaatcgtcgatgctcatgccgccgttgttgctgcatccggtggtagcggcggc

SEQ ID NO: 622 - protein, 413 aa, synthetic construct
  REGION 1..413: note = Variant of serine peptidase from Bacillus sinesaloumensis
MADQASQANGNQDVIEGELIVSVEPKNGKPDVSIQSAQSVTGQEDVLKSKGFTIVDTLHVEDSSVKPLVSKNFNKKVVEKMGLVYLVQYSPDQFKSSNIAKKELRKELMDLGFKVRYISENYKMMAIEGTATLQAVHPNQNWHYNMIKAPEAWAITSGSSSVKVAVLDTGIDHNHPSLANFVNTNLGRSFVGGNTMDGQGHGTHVAGTIASYGSVSGVMQSATLIPVKVLDNSGSGSLYGITQGILYAADIDADVINMSLGGGGGNQSMDEAVQTAVAQGTIVVAATGNDGASSISYPAAYSSVIAVGSVDSNRTKSSFSNYGSGLEVMAPGSNIYSTYPNSRYTSLSGTSMATPHVAGVAGLIRAANPGISVAQARQILRDTAQEAGSFTQYGYGIVDAHAAVVAASGGSGG

SEQ ID NO: 623 - DNA, 1239 bp, synthetic construct
  misc_feature 1..1239: note = Variant of serine peptidase from Bacillus sinesaloumensis
  source 1..1239: mol_type = other DNA
atggcagatcaagctagtcaagctaatggaaaccaggacgtcattgaaggcgagctgatcgtttcagtggaaccgaagaacggtaaacctgatgtgagcattcaaagtgcacaatccgtaacagggcaggaagacgtccttaaatcgaaaggctttacgatcgttgataccttgcatgtagaggatagcagcgtcaagccactcgtctcgaagaatttcaataagaaagtggtggagaagatgggactggtgtatcttgttcaatactctccggaccagtttaaaagttccaacattgcgaagaaagaactcagaaaagaattgatggatctgggctttaaagtccgctatataagcgaaaattacaagatgatggcgatcgaaggtacagccactcttcaggcagtacaccctaaccaacaatggcattataatatgattaaagctccggaagcgtgggctattacgtctggatcctctagcgttaaagtagcagtcctggatacagggatcgaccataatcacccatccttggccaacttcgtgaatactaattacggccggtcgtttgttggaggaaacaccatggatgttcaaggtcatggcacacatgttgctggcacgattgcatcttatgggagtgtaagcggagtgatgcagagtgcgacactgatcccggtcaaagtgctcgataattctggcagcgggtccctttacggtattacgcaaggcatattgtatgccgccgacatcgatgcggacgtcattaacatgtctctgggtggaggaggcggtaatcagagcatggatgaggctgttcaaacagcagttgctcagggaaccattgtagtagcagcgactggcaatgatggtgcatcgtcgatcagttatcctgctgcctacagcagcgtcattgcggtgggatctgtggactccaatcgtacacgttcctcgttttctaactatggatctgggcttgaagttatggcaccgggcagcaacatctacagtacgtatcctaattccagatatacatctttgagtggtacaagcatggctactccgcacgttgcgggcgtagctgggctcattcgcgcagccaacccagacatatctgtcgcgcaagcccgtcagattctgcgggataccgcgcaagaagcaggatcgttcacacagtacggctatggaatcgtcgatgctcatgccgccgttgttgctgcatccggtggtagcggcggc

SEQ ID NO: 624 - protein, 413 aa, synthetic construct
  REGION 1..413: note = Variant of serine peptidase from Bacillus sinesaloumensis
MADQASQANGNQDVIEGELIVSVEPKNGKPDVSIQSAQSVTGQEDVLKSKGFTIVDTLHVEDSSVKPLVSKNFNKKVVEKMGLVYLVQYSPDQFKSSNIAKKELRKELMDLGFKVRYISENYKMMAIEGTATLQAVHPNQQWHYNMIKAPEAWAITSGSSSVKVAVLDTGIDHNHPSLANFVNTNYGRSFVGGNTMDVQGHGTHVAGTIASYGSVSGVMQSATLIPVKVLDNSGSGSLYGITQGILYAADIDADVINMSLGGGGGNQSMDEAVQTAVAQGTIVVAATGNDGASSISYPAAYSSVIAVGSVDSNRTRSSFSNYGSGLEVMAPGSNIYSTYPNSRYTSLSGTSMATPHVAGVAGLIRAANPDISVAQARQILRDTAQEAGSFTQYGYGIVDAHAAVVAASGGSGG

SEQ ID NO: 625 - DNA, 1239 bp, synthetic construct
  misc_feature 1..1239: note = Variant of serine peptidase from Bacillus sinesaloumensis
  source 1..1239: mol_type = other DNA
atggcagatcaagctagtcaagctaatggaaaccaggacgtcattgaaggcgagctgatcgtttcagtggaaccgaagaacggtaaacctgatgtgagcattcaaagtgcacaatccgtaacagggcaggaagacgtccttaaatcgaaaggctttacgatcgttgataccttgcatgtagaggatagcagcgtcaagccactcgtctcgaagaatttcaataagaaagtggtggagaagatgggactggtgtatcttgttcaatactctccggaccagtttaaaagttccaacattgcgaagaaagaactcagaaaagaattgatggatctgggctttaaagtccgctatataagcgaaaattacaagatgatggcgatcgaaggtacagccactcttcaggcagtacaccctaaccaacaatggcattataatatgattaaagctccggaagcgtgggctattacgtctggatcctctagcgttaaagtagcagtcctggatacagggatcgaccataatcacccatccttggccaacttcgtgaatactaatcttggccggtcgtttgttggaggaaacaccatggatggccaaggtcatggcacacatgttgctggcacgattgcatcttatgggagtgtaagcggagtgatgcagagtgcgacactgatcccggtcaaagtgctcgataattctggcagcgggtccctttacggtattacgcaaggcatattgtatgccgccgacatcgatgcggacgtcattaacatgtctctgggtggaggaggcggtaatcagagcatggatgaggctgttcaaacagcagttgctcagggaaccattgtagtagcagcgactggcaatgatggtgcatcgtcgatcagttatcctgctgcctacagcagcgtcattgcggtgggatctgtggactccaatcgtacacgttcctcgttttctaactatggatctgggcttgaagttatggcaccgggcagcaacatctacagtacgtatcctaatagcagatatacatctttgagtggtacaagcatggctactccgcacgttgcgggcgtagctgggctcattcgcgcagccaacccaggcatatctgtcgcgcaagcccgtcagattctgcgggataccgcgcaagaagcaggatcgttcacacaatacggctatggaatcgtcgatgctcatgccgccgttgttgctgcatccggtggtagcggcggc

SEQ ID NO: 626 - protein, 413 aa, synthetic construct
  REGION 1..413: note = Variant of serine peptidase from Bacillus sinesaloumensis
MADQASQANGNQDVIEGELIVSVEPKNGKPDVSIQSAQSVTGQEDVLKSKGFTIVDTLHVEDSSVKPLVSKNFNKKVVEKMGLVYLVQYSPDQFKSSNIAKKELRKELMDLGFKVRYISENYKMMAIEGTATLQAVHPNQQWHYNMIKAPEAWAITSGSSSVKVAVLDTGIDHNHPSLANFVNTNLGRSFVGGNTMDGQGHGTHVAGTIASYGSVSGVMQSATLIPVKVLDNSGSGSLYGITQGILYAADIDADVINMSLGGGGGNQSMDEAVQTAVAQGTIVVAATGNDGASSISYPAAYSSVIAVGSVDSNRTRSSFSNYGSGLEVMAPGSNIYSTYPNSRYTSLSGTSMATPHVAGVAGLIRAANPGISVAQARQILRDTAQEAGSFTQYGYGIVDAHAAVVAASGGSGG

SEQ ID NO: 627 - DNA, 1239 bp, synthetic construct; identical to SEQ ID NO: 3
  misc_feature 1..1239: note = Variant of serine peptidase from Bacillus sinesaloumensis
  source 1..1239: mol_type = other DNA

SEQ ID NO: 628 - protein, 413 aa, synthetic construct; identical to SEQ ID NO: 4
  REGION 1..413: note = Variant of serine peptidase from Bacillus sinesaloumensis

SEQ ID NO: 629 - DNA, 1239 bp, synthetic construct
  misc_feature 1..1239: note = Variant of serine peptidase from Bacillus sinesaloumensis
  source 1..1239: mol_type = other DNA
atggcagatcaagctagtcaagctaatggaaaccaggacgtcattgaaggcgagctgatcgtttcagtggaaccgaagaacggtaaacctgatgtgagcattcaaagtgcacaatccgtaacagggcaggaagacgtccttaaatcgaaaggctttacgatcgttgataccttgcatgtagaggatagcagcgtcaagccactcgtctcgaagaatttcaataagaaagtggtggagaagatgggactggtgtatcttgttcaatactctccggaccagtttaaaagttccaacattgcgaagaaagaactcagaaaagaattgatggatctgggctttaaagtccgctatataagcgaaaattacaagatgatggcgatcgaaggtacagccactcttcaggcagtacaccctaaccaaaactggcattataatatgattaaagctccggaagcgtgggctattacgtctggatcctctagcgttaaagtagcagtcctggatacagggatcgaccataatcacccatccttggccaacttcgtgaatactaatcttggccggtcgtttgttggaggaaacaccatggatgttcaaggtcatggcacacatgttgctggcacgattgcatcttatgggagtgtaagcggagtgatgcagagtgcgacactgatcccggtcaaagtgctcgataattctggcagcgggtccctttacggtattgagcaaggcatattgtatgccgccgacatcgatgcggacgtcattaacatgtctctgggtggaggaggctataatcagagcatggatgaggctgttcaaacagcagttgctcagggaaccattgtagtagcagcgactggcaatgatggtgcatcgtcgatcagttatcctgctgcctacagcagcgtcattgcggtgggatctgtgacgtccaatcgtacacgatcctcgttttctaactatggatctgggcttgaagttatggcaccgggcagcaacatctacagtacgtatcctaattccagatatacatctttgagtggtacaagcatggctactccgcacgttgcgggcgtagctgggctcattcgcgcagccaacccagacatatctgtcgcgcaagcccgtcagattctgcgggataccgcgcaagaagcaggatcgttcacacagtacggctatggaatcgtcgatgctcatgccgccgttgttgctgcatccggtggtagcggcggc

SEQ ID NO: 630 - protein, 413 aa, synthetic construct
  REGION 1..413: note = Variant of serine peptidase from Bacillus sinesaloumensis
MADQASQANGNQDVIEGELIVSVEPKNGKPDVSIQSAQSVTGQEDVLKSKGFTIVDTLHVEDSSVKPLVSKNFNKKVVEKMGLVYLVQYSPDQFKSSNIAKKELRKELMDLGFKVRYISENYKMMAIEGTATLQAVHPNQNWHYNMIKAPEAWAITSGSSSVKVAVLDTGIDHNHPSLANFVNTNLGRSFVGGNTMDVQGHGTHVAGTIASYGSVSGVMQSATLIPVKVLDNSGSGSLYGIEQGILYAADIDADVINMSLGGGGYNQSMDEAVQTAVAQGTIVVAATGNDGASSISYPAAYSSVIAVGSVTSNRTRSSFSNYGSGLEVMAPGSNIYSTYPNSRYTSLSGTSMATPHVAGVAGLIRAANPDISVAQARQILRDTAQEAGSFTQYGYGIVDAHAAVVAASGGSGG

SEQ ID NO: 631 - DNA, 1239 bp, synthetic construct
  misc_feature 1..1239: note = Variant of serine peptidase from Bacillus sinesaloumensis
  source 1..1239: mol_type = other DNA
atggcagatcaagctagtcaagctaatggaaaccaggacgtcattgaaggcgagctgatcgtttcagtggaaccgaagaacggtaaacctgatgtgagcattcaaagtgcacaatccgtaacagggcaggaagacgtccttaaatcgaaaggctttacgatcgttgataccttgcatgtagaggatagcagcgtcaagccactcgtctcgaagaatttcaataagaaagtggtggagaagatgggactggtgtatcttgttcaatactctccggaccagtttaaaagttccaacattgcgaagaaagaactcagaaaagaattgatggatctgggctttaaagtccgctatataagcgaaaattacaagatgatggcgatcgaaggtacagccactcttcaggcagtacaccctaaccaaaactggcattataatatgattaaagctccggaagcgtgggctattacggtgggatcctctagcgttaaagtagcagtcctggatacagggatcgaccataatcacccatccttggccaacttcgtgaatactaatcttggccggtcgtttgttggaggaaacaccatggatgttcaaggtcatggcacacatgttgctggcacgattgcatcttatgggagtgtaagcggagtgatgcagagtgcgacactgatcccggtcaaagtgctcgataattctggcagcgggtccctttacggtattacgcaaggcatattgtatgccgccgacatcgatgcggacgtcattaacatgtctctgggtggaggaggctataatcagagcatggatgaggctgttcaaacagcagttgctcagggaaccattgtagtagcagcgactggcaatgatggtgcatcgtcgatcagttatcctgctgcctacagcagcgtcattgcggtgggatctgtgacgtccaatcgtacacgatcctcgttttctaactatggatctgggcttgaagttatggcaccgggcagcaacatctacagtacgtatcctaattccagatatacatctttgagtggtacaagcatggctactccgcacgttgcgggcgtagctgggctcattcgcgcagccaacccagacatatctgtcgcgcaagcccgtcagattctgcgggataccgcgcaagaagcaggatcgttcacacagtacggctatggaatcgtcgatgctcatgccgccgttgttgctgcatccggtggtagcggcggc

SEQ ID NO: 632 - protein, 413 aa, synthetic construct
  REGION 1..413: note = Variant of serine peptidase from Bacillus sinesaloumensis
MADQASQANGNQDVIEGELIVSVEPKNGKPDVSIQSAQSVTGQEDVLKSKGFTIVDTLHVEDSSVKPLVSKNFNKKVVEKMGLVYLVQYSPDQFKSSNIAKKELRKELMDLGFKVRYISENYKMMAIEGTATLQAVHPNQNWHYNMIKAPEAWAITVGSSSVKVAVLDTGIDHNHPSLANFVNTNLGRSFVGGNTMDVQGHGTHVAGTIASYGSVSGVMQSATLIPVKVLDNSGSGSLYGITQGILYAADIDADVINMSLGGGGYNQSMDEAVQTAVAQGTIVVAATGNDGASSISYPAAYSSVIAVGSVTSNRTRSSFSNYGSGLEVMAPGSNIYSTYPNSRYTSLSGTSMATPHVAGVAGLIRAANPDISVAQARQILRDTAQEAGSFTQYGYGIVDAHAAVVAASGGSGG

SEQ ID NO: 633 - DNA, 1239 bp, synthetic construct
  misc_feature 1..1239: note = Variant of serine peptidase from Bacillus sinesaloumensis
  source 1..1239: mol_type = other DNA
atggcagatcaagctagtcaagctaatggaaaccaggacgtcattgaaggcgagctgatcgtttcagtggaaccgaagaacggtaaacctgatgtgagcattcaaagtgcacaatccgtaacagggcaggaagacgtccttaaatcgaaaggctttacgatcgttgataccttgcatgtagaggatagcagcgtcaagccactcgtctcgaagaatttcaataagaaagtggtggagaagatgggactggtgtatcttgttcaatactctccggaccagtttaaaagttccaacattgcgaagaaagaactcagaaaagaattgatggatctgggctttaaagtccgctatataagcgaaaattacaagatgatggcgatcgaaggtacagccactcttcaggcagtacaccctaaccaaaactggcattataatatgattaaagctccggaagcgtgggctattacgtctggatcctctagcgttaaagtagcagtcctggatacagggatcgaccataatcacccatccttggccaacttcgtgaatactaatcttggccggtcgtttgttggaggaaacaccatggatgttcaaggtcatggcacacatgttgctggcacgattgcatcttatgggagtgtaagcggagtgatgcagagtgcgacactgatcccggtcaaagtgctcgataattctggcagcgggtccctttacggtattacgcaaggcatattgtatgccgccaatatcgatgcggacgtcattaacatgtctctgggtggaggaggctataatcagagcatggatgaggctgttcaaacagcagttgctcagggaaccattgtagtagcagcgactggcaatgatggtgcatcgtcgatcagttatcctgctgcctacagcagcgtcattgcggtgggatctgtgacgtccaatcgtacacgatcctcgttttctaactatggatctgggcttgaagttatggcaccgggcagcaacatctacagtacgtatcctaattccagatatacatctttgagtggtacaagcatggctactccgcacgttgcgggcgtagctgggctcattcgcgcagccaacccagacatatctgtcgcgcaagcccgtcagattctgcgggataccgcgcaagaagcaggatcgttcacacagtacggctatggaatcgtcgatgctcatgccgccgttgttgctgcatccggtggtagcggcggc

SEQ ID NO: 634 - protein, 413 aa, synthetic construct
  REGION 1..413: note = Variant of serine peptidase from Bacillus sinesaloumensis
MADQASQANGNQDVIEGELIVSVEPKNGKPDVSIQSAQSVTGQEDVLKSKGFTIVDTLHVEDSSVKPLVSKNFNKKVVEKMGLVYLVQYSPDQFKSSNIAKKELRKELMDLGFKVRYISENYKMMAIEGTATLQAVHPNQNWHYNMIKAPEAWAITSGSSSVKVAVLDTGIDHNHPSLANFVNTNLGRSFVGGNTMDVQGHGTHVAGTIASYGSVSGVMQSATLIPVKVLDNSGSGSLYGITQGILYAANIDADVINMSLGGGGYNQSMDEAVQTAVAQGTIVVAATGNDGASSISYPAAYSSVIAVGSVTSNRTRSSFSNYGSGLEVMAPGSNIYSTYPNSRYTSLSGTSMATPHVAGVAGLIRAANPDISVAQARQILRDTAQEAGSFTQYGYGIVDAHAAVVAASGGSGG

SEQ ID NO: 635 - DNA, 1239 bp, synthetic construct
  misc_feature 1..1239: note = Variant of serine peptidase from Bacillus sinesaloumensis
  source 1..1239: mol_type = other DNA
atggcagatcaagctagtcaagctaatggaaaccaggacgtcattgaaggcgagctgatcgtttcagtggaaccgaagaacggtaaacctgatgtgagcattcaaagtgcacaatccgtaacagggcaggaagacgtccttaaatcgaaaggctttacgatcgttgataccttgcatgtagaggatagcagcgtcaagccactcgtctcgaagaatttcaataagaaagtggtggagaagatgggactggtgtatcttgttcaatactctccggaccagtttaaaagttccaacattgcgaagaaagaactcagaaaagaattgatggatctgggctttaaagtccgctatataagcgaaaattacaagatgatggcgatcgaaggtacagccactcttcaggcagtacaccctaaccaaaactggcattataatatgattaaagctccggaagcgtgggctattacgtctggatcctctagcgttaaagtagcagtcctggatacagggatcgaccataatcacccatccttggccaacttcgtgaatactaatcttggccggtcgtttgttggaggaaacaccatggatgttcaaggtcatggcacacatgttgctggcacgattgcatcttatgggagtgtaagcggagtgatgcagagtgcgacactgatcccggtcaaagtgctcgataattctggcagcgggtccctttacggtattacgcaaggcatattgtatgccgccgacatcgatgcggacgtcattaacatgtctctgggtggaggaggctataatcagagcatggatgaggctgttcaaacagcagttgctcagggaaccattgtagtagcagcgactggcaatgatggtgcatcgtcgatcagttatcctgctgcctacagcagcgtcattgcggtgggatctgtgacgtccaatcgtacacgatcctcgttttctaactatggatctgggcttgaagttatggcaccgggcagcaacatctacagtacgtatcctaattccagatatacatctttgagtggtacaagcatggctactccgcacgttgcgggcgtagctgggctcattcgcgcagccaacccagacatatcttttgcgcaagcccgtcagattctgcgggataccgcgcaagaagcaggatcgttcacacagtacggctatggaatcgtcgatgctcatgccgccgttgttgctgcatccggtggtagcggcggc

SEQ ID NO: 636 - protein, 413 aa, synthetic construct
  REGION 1..413: note = Variant of serine peptidase from Bacillus sinesaloumensis
MADQASQANGNQDVIEGELIVSVEPKNGKPDVSIQSAQSVTGQEDVLKSKGFTIVDTLHVEDSSVKPLVSKNFNKKVVEKMGLVYLVQYSPDQFKSSNIAKKELRKELMDLGFKVRYISENYKMMAIEGTATLQAVHPNQNWHYNMIKAPEAWAITSGSSSVKVAVLDTGIDHNHPSLANFVNTNLGRSFVGGNTMDVQGHGTHVAGTIASYGSVSGVMQSATLIPVKVLDNSGSGSLYGITQGILYAADIDADVINMSLGGGGYNQSMDEAVQTAVAQGTIVVAATGNDGASSISYPAAYSSVIAVGSVTSNRTRSSFSNYGSGLEVMAPGSNIYSTYPNSRYTSLSGTSMATPHVAGVAGLIRAANPDISFAQARQILRDTAQEAGSFTQYGYGIVDAHAAVVAASGGSGG

SEQ ID NO: 637 - DNA, 1239 bp, synthetic construct
  misc_feature 1..1239: note = Variant of serine peptidase from Bacillus sinesaloumensis
  source 1..1239: mol_type = other DNA
atggcagatcaagctagtcaagctaatggaaaccaggacgtcattgaaggcgagctgatcgtttcagtggaaccgaagaacggtaaacctgatgtgagcattcaaagtgcacaatccgtaacagggcaggaagacgtccttaaatcgaaaggctttacgatcgttgataccttgcatgtagaggatagcagcgtcaagccactcgtctcgaagaatttcaataagaaagtggtggagaagatgggactggtgtatcttgttcaatactctccggaccagtttaaaagttccaacattgcgaagaaagaactcagaaaagaattgatggatctgggctttaaagtccgctatataagcgaaaattacaagatgatggcgatcgaaggtacagccactcttcaggcagtacaccctaaccaaaactggcattataatatgattaaagctccggaagcgtgggctattacgtctggatcctctagcgttaaagtagcagtcctggatacagggatcgaccataatcacccatccttggccaacttcgtgaatactaatcttggccggtcgtttgttggaggaaacaccatggatgttcaaggtcatggcacacatgttgctggcacgattgcatcttatgggagtgtaagcggagtgatgcagagtgcgacactgatcccggtcaaagtgctcgataattctggcagcgggtccctttacggtattacgcggggcatattgtatgccgccgacatcgatgcggacgtcattaacatgtctctgggtggaggaggctataatcagagcatggatgaggctgttcaaacagcagttgctcagggaaccattgtagtagcagcgactggcaatgatggtgcatcgtcgatcagttatcctgctgcctacagcagcgtcattgcggtgggatctgtgacgtccaatcgtacacgatcctcgttttctaactatggatctgggcttgaagttatggcaccgggcagcaacatctacagtacgtatcctaattccagatatacatctttgagtggtacaagcatggctactccgcacgttgcgggcgtagctgggctcattcgcgcagccaacccagacatatctgtcgcgcaagcccgtcagattctgcgggataccgcgcaagaagcaggatcgttcacacagtacggctatggaatcgtcgatgctcatgccgccgttgttgctgcatccggtggtagcggcggc

SEQ ID NO: 638 - protein, 413 aa, synthetic construct
  REGION 1..413: note = Variant of serine peptidase from Bacillus sinesaloumensis
MADQASQANGNQDVIEGELIVSVEPKNGKPDVSIQSAQSVTGQEDVLKSKGFTIVDTLHVEDSSVKPLVSKNFNKKVVEKMGLVYLVQYSPDQFKSSNIAKKELRKELMDLGFKVRYISENYKMMAIEGTATLQAVHPNQNWHYNMIKAPEAWAITSGSSSVKVAVLDTGIDHNHPSLANFVNTNLGRSFVGGNTMDVQGHGTHVAGTIASYGSVSGVMQSATLIPVKVLDNSGSGSLYGITRGILYAADIDADVINMSLGGGGYNQSMDEAVQTAVAQGTIVVAATGNDGASSISYPAAYSSVIAVGSVTSNRTRSSFSNYGSGLEVMAPGSNIYSTYPNSRYTSLSGTSMATPHVAGVAGLIRAANPDISVAQARQILRDTAQEAGSFTQYGYGIVDAHAAVVAASGGSGG

SEQ ID NO: 639 - DNA, 1239 bp, synthetic construct
  misc_feature 1..1239: note = Variant of serine peptidase from Bacillus sinesaloumensis
  source 1..1239: mol_type = other DNA
atggcagatcaagctagtcaagctaatggaaaccaggacgtcattgaaggcgagctgatcgtttcagtggaaccgaagaacggtaaacctgatgtgagcattcaaagtgcacaatccgtaacagggcaggaagacgtccttaaatcgaaaggctttacgatcgttgataccttgcatgtagaggatagcagcgtcaagccactcgtctcgaagaatttcaataagaaagtggtggagaagatgggactggtgtatcttgttcaatactctccggaccagtttaaaagttccaacattgcgaagaaagaactcagaaaagaattgatggatctgggctttaaagtccgctatataagcgaaaattacaagatgatggcgatcgaaggtacagccactcttcaggcagtacaccctaaccaaaactggcattataatatgattaaagctccggaagcgtgggctattacgtctggatcctctagcgttaaagtagcagtcctggatacagggatcgaccataatcacccatccttggccaacttcgtgaatactaatcttggccggtcgtttgttggaggaaacaccatggatgttcaaggtcatggcacacatgttgctggcacgattgcatcttatgggagtgtaagcggagtgatgcagagtgcgacactgatcccggtcaaagtgctcgataattctggcagcgggtccctttacggtattacgcaaggcatattgtatgccgccgacatcgatgcggacgtcattaacatgtctctgggtggaggaggctataatcagagcatggatgaggctgttcaaacagcagttgctcagggaaccattgtagtagcagcgactggcaatgatggtgcatcgtcgatcagttatcctgctgcctacagcagcgtcattgcggtgggatctgtgacgtccaatcgtacacgatcctcgttttctaactatggatctgggcttgaagttatggcaccgggcagcaacatctttagtacgtatcctaattccagatatacatctttgagtggtacaagcatggctactccgcacgttgcgggcgtagctgggctcattcgcgcagccaacccagacatatctgtcgcgcaagcccgtcagattctgcgggataccgcgcaagaagcaggatcgttcacacagtacggctatggaatcgtcgatgctcatgccgccgttgttgctgcatccggtggtagcggcggc

SEQ ID NO: 640 - protein, 413 aa, synthetic construct
  REGION 1..413: note = Variant of serine peptidase from Bacillus sinesaloumensis
MADQASQANGNQDVIEGELIVSVEPKNGKPDVSIQSAQSVTGQEDVLKSKGFTIVDTLHVEDSSVKPLVSKNFNKKVVEKMGLVYLVQYSPDQFKSSNIAKKELRKELMDLGFKVRYISENYKMMAIEGTATLQAVHPNQNWHYNMIKAPEAWAITSGSSSVKVAVLDTGIDHNHPSLANFVNTNLGRSFVGGNTMDVQGHGTHVAGTIASYGSVSGVMQSATLIPVKVLDNSGSGSLYGITQGILYAADIDADVINMSLGGGGYNQSMDEAVQTAVAQGTIVVAATGNDGASSISYPAAYSSVIAVGSVTSNRTRSSFSNYGSGLEVMAPGSNIFSTYPNSRYTSLSGTSMATPHVAGVAGLIRAANPDISVAQARQILRDTAQEAGSFTQYGYGIVDAHAAVVAASGGSGG

SEQ ID NO: 641 - DNA, 1239 bp, synthetic construct
  misc_feature 1..1239: note = Variant of serine peptidase from Bacillus sinesaloumensis
  source 1..1239: mol_type = other DNA
atggcagatcaagctagtcaagctaatggaaaccaggacgtcattgaaggcgagctgatcgtttcagtggaaccgaagaacggtaaacctgatgtgagcattcaaagtgcacaatccgtaacagggcaggaagacgtccttaaatcgaaaggctttacgatcgttgataccttgcatgtagaggatagcagcgtcaagccactcgtctcgaagaatttcaataagaaagtggtggagaagatgggactggtgtatcttgttcaatactctccggaccagtttaaaagttccaacattgcgaagaaagaactcagaaaagaattgatggatctgggctttaaagtccgctatataagcgaaaattacaagatgatggcgatcgaaggtacagccactcttcaggcagtacaccctaaccaaaactggcattataatatgattaaagctccggaagcgtgggctattacgtctggatcctctagcgttaaagtagcagtcctggatacagggatcgaccataatcacccatccttggccaacttcgtgaatactaatcttgcgcggtcgtttgttggaggaaacaccatggatgttcaaggtcatggcacacatgttgctggcacgattgcatcttatgggagtgtaagcggagtgatgcagagtgcgacactgatcccggtcaaagtgctcgataattctggcagcgggtccctttacggtattacgcaaggcatattgtatgccgccgacatcgatgcggacgtcattaacatgtctctgggtggaggaggctataatcagagcatggatgaggctgttcaaacagcagttgctcagggaaccattgtagtagcagcgactggcaatgatggtgcatcgtcgatcagttatcctgctgcctacagcagcgtcattgcggtgggatctgtgacgtccaatcgtacacgatcctcgttttctaactatggatctgggcttgaagttatggcaccgggcagcaacatctacagtacgtatcctaattccagatatacatctttgagtggtacaagcatggctactccgcacgttgcgggcgtagctgggctcattcgcgcagccaacccagacatatctgtcgcgcaagcccgtcagattctgcgggataccgcgcaagaagcaggatcgttcacacagtacggctatggaatcgtcgatgctcatgccgccgttgttgctgcatccggtggtagcggcggc

SEQ ID NO: 642 - protein, 413 aa, synthetic construct
  REGION 1..413: note = Variant of serine peptidase from Bacillus sinesaloumensis
MADQASQANGNQDVIEGELIVSVEPKNGKPDVSIQSAQSVTGQEDVLKSKGFTIVDTLHVEDSSVKPLVSKNFNKKVVEKMGLVYLVQYSPDQFKSSNIAKKELRKELMDLGFKVRYISENYKMMAIEGTATLQAVHPNQNWHYNMIKAPEAWAITSGSSSVKVAVLDTGIDHNHPSLANFVNTNLARSFVGGNTMDVQGHGTHVAGTIASYGSVSGVMQSATLIPVKVLDNSGSGSLYGITQGILYAADIDADVINMSLGGGGYNQSMDEAVQTAVAQGTIVVAATGNDGASSISYPAAYSSVIAVGSVTSNRTRSSFSNYGSGLEVMAPGSNIYSTYPNSRYTSLSGTSMATPHVAGVAGLIRAANPDISVAQARQILRDTAQEAGSFTQYGYGIVDAHAAVVAASGGSGG

SEQ ID NO: 643 - DNA, 1239 bp, synthetic construct
  misc_feature 1..1239: note = Variant of serine peptidase from Bacillus sinesaloumensis
  source 1..1239: mol_type = other DNA
atggcagatcaagctagtcaagctaatggaaaccaggacgtcattgaaggcgagctgatcgtttcagtggaaccgaagaacggtaaacctgatgtgagcattcaaagtgcacaatccgtaacagggcaggaagacgtccttaaatcgaaaggctttacgatcgttgataccttgcatgtagaggatagcagcgtcaagccactcgtctcgaagaatttcaataagaaagtggtggagaagatgggactggtgtatcttgttcaatactctccggaccagtttaaaagttccaacattgcgaagaaagaactcagaaaagaattgatggatctgggctttaaagtccgctatataagcgaaaattacaagatgatggcgatcgaaggtacagccactcttcaggcagtacaccctaaccaaaactggcattataatatgattaaagctccggaagcgtgggctattacgtctggatcctctagcgttaaagtagcagtcctggatacagggatcgaccataatcacccatccttggccaacttcgtgaatactaatcttggccggtcgtttgttggaggaaacaccatggatgttcaaggtcatggcacacatgttgctggcacgattgcatcttatgggagtgtaagcggagtgatgcagagtgcgacactgatcccggtcaaagtgctcgataattctggcagcgggtccctttacgcgattacgcaaggcatattgtatgccgccgacatcgatgcggacgtcattaacatgtctctgggtggaggaggctataatcagagcatggatgaggctgttcaaacagcagttgctcagggaaccattgtagtagcagcgactggcaatgatggtgcatcgtcgatcagttatcctgctgcctacagcagcgtcattgcggtgggatctgtgacgtccaatcgtacacgatcctcgttttctaactatggatctgggcttgaagttatggcaccgggcagcaacatctacagtacgtatcctaattccagatatacatctttgagtggtacaagcatggctactccgcacgttgcgggcgtagctgggctcattcgcgcagccaacccagacatatctgtcgcgcaagcccgtcagattctgcgggataccgcgcaagaagcaggatcgttcacacagtacggctatggaatcgtcgatgctcatgccgccgttgttgctgcatccggtggtagcggcggc

SEQ ID NO: 644 - protein, 413 aa, synthetic construct
  REGION 1..413: note = Variant of serine peptidase from Bacillus sinesaloumensis
MADQASQANGNQDVIEGELIVSVEPKNGKPDVSIQSAQSVTGQEDVLKSKGFTIVDTLHVEDSSVKPLVSKNFNKKVVEKMGLVYLVQYSPDQFKSSNIAKKELRKELMDLGFKVRYISENYKMMAIEGTATLQAVHPNQNWHYNMIKAPEAWAITSGSSSVKVAVLDTGIDHNHPSLANFVNTNLGRSFVGGNTMDVQGHGTHVAGTIASYGSVSGVMQSATLIPVKVLDNSGSGSLYAITQGILYAADIDADVINMSLGGGGYNQSMDEAVQTAVAQGTIVVAATGNDGASSISYPAAYSSVIAVGSVTSNRTRSSFSNYGSGLEVMAPGSNIYSTYPNSRYTSLSGTSMATPHVAGVAGLIRAANPDISVAQARQILRDTAQEAGSFTQYGYGIVDAHAAVVAASGGSGG

SEQ ID NO: 645 - DNA, 1239 bp, synthetic construct
  misc_feature 1..1239: note = Variant of serine peptidase from Bacillus sinesaloumensis
  source 1..1239: mol_type = other DNA
atggcagatcaagctagtcaagctaatggaaaccaggacgtcattgaaggcgagctgatcgtttcagtggaaccgaagaacggtaaacctgatgtgagcattcaaagtgcacaatccgtaacagggcaggaagacgtccttaaatcgaaaggctttacgatcgttgataccttgcatgtagaggatagcagcgtcaagccactcgtctcgaagaatttcaataagaaagtggtggagaagatgggactggtgtatcttgttcaatactctccggaccagtttaaaagttccaacattgcgaagaaagaactcagaaaagaattgatggatctgggctttaaagtccgctatataagcgaaaattacaagatgatggcgatcgaaggtacagccactcttcaggcagtacaccctaaccaaaactggcattataatatgattaaagctccggaagcgtgggctattacgtctggatcctctagcgttaaagtagcagtcctggatacagggatcgaccataatcacccatccttggccaacttcgtgaatactaatcttggccggtcgtttgttggaggaaacaccatggatgttcaaggtcatggcacacatgttgctggcacgattgcatcttatgggagtgtaagcggagtgatgcagagtgcgacactgatcccggtcaaagtgctcgataattctggcagcgggtccctttacggtattacgcaaggcatattgtatgccgccgacatcgatgcggacgtcattaacatgtctctgggtggaggaggctataatcagagcatggatgaggctgttcaaacagcagttgctcagaagaccattgtagtagcagcgactggcaatgatggtgcatcgtcgatcagttatcctgctgcctacagcagcgtcattgcggtgggatctgtgacgtccaatcgtacacgatcctcgttttctaactatggatctgggcttgaagttatggcaccgggcagcaacatctacagtacgtatcctaattccagatatacatctttgagtggtacaagcatggctactccgcacgttgcgggcgtagctgggctcattcgcgcagccaacccagacatatctgtcgcgcaagcccgtcagattctgcgggataccgcgcaagaagcaggatcgttcacacagtacggctatggaatcgtcgatgctcatgccgccgttgttgctgcatccggtggtagcggcggc

SEQ ID NO: 646 - protein, 413 aa, synthetic construct
  REGION 1..413: note = Variant of serine peptidase from Bacillus sinesaloumensis
MADQASQANGNQDVIEGELIVSVEPKNGKPDVSIQSAQSVTGQEDVLKSKGFTIVDTLHVEDSSVKPLVSKNFNKKVVEKMGLVYLVQYSPDQFKSSNIAKKELRKELMDLGFKVRYISENYKMMAIEGTATLQAVHPNQNWHYNMIKAPEAWAITSGSSSVKVAVLDTGIDHNHPSLANFVNTNLGRSFVGGNTMDVQGHGTHVAGTIASYGSVSGVMQSATLIPVKVLDNSGSGSLYGITQGILYAADIDADVINMSLGGGGYNQSMDEAVQTAVAQKTIVVAATGNDGASSISYPAAYSSVIAVGSVTSNRTRSSFSNYGSGLEVMAPGSNIYSTYPNSRYTSLSGTSMATPHVAGVAGLIRAANPDISVAQARQILRDTAQEAGSFTQYGYGIVDAHAAVVAASGGSGG

SEQ ID NO: 647 - DNA, 1239 bp, synthetic construct
  misc_feature 1..1239: note = Variant of serine peptidase from Bacillus sinesaloumensis
  source 1..1239: mol_type = other DNA
atggcagatcaagctagtcaagctaatggaaaccaggacgtcattgaaggcgagctgatcgtttcagtggaaccgaagaacggtaaacctgatgtgagcattcaaagtgcacaatccgtaacagggcaggaagacgtccttaaatcgaaaggctttacgatcgttgataccttgcatgtagaggatagcagcgtcaagccactcgtctcgaagaatttcaataagaaagtggtggagaagatgggactggtgtatcttgttcaatactctccggaccagtttaaaagttccaacattgcgaagaaagaactcagaaaagaattgatggatctgggctttaaagtccgctatataagcgaaaattacaagatgatggcgatcgaaggtacagccactcttcaggcagtacaccctaaccaaaactggcattataatatgattaaagctccggaagcgtgggctattacgtctggatcctctagcgttaaagtagcagtcctggatacagggatcgaccataatcacccatccttggccaacttcgtgaatactaatcttggccggtcgtttgttggaggaaacaccatggatgttcaaggtcatggcacacatgttgctggcacgattgcatcttatgggagtgtaagcggagtgatgcagagtgcgacactgatcccggtcaaagtgctcgataattctggcagcgggtccctttacggtattacgcaaggcatattgtatgccgccgacatcgatgcggacgtcattaacatgtctctgggtggaggaggctataatcagagcatggatgcggctgttcaaacagcagttgctcagggaaccattgtagtagcagcgactggcaatgatggtgcatcgtcgatcagttatcctgctgcctacagcagcgtcattgcggtgggatctgtgacgtccaatcgtacacgatcctcgttttctaactatggatctgggcttgaagttatggcaccgggcagcaacatctacagtacgtatcctaattccagatatacatctttgagtggtacaagcatggctactccgcacgttgcgggcgtagctgggctcattcgcgcagccaacccagacatatctgtcgcgcaagcccgtcagattctgcgggataccgcgcaagaagcaggatcgttcacacagtacggctatggaatcgtcgatgctcatgccgccgttgttgctgcatccggtggtagcggcggc

SEQ ID NO: 648 - protein, 413 aa, synthetic construct
  REGION 1..413: note = Variant of serine peptidase from Bacillus sinesaloumensis
MADQASQANGNQDVIEGELIVSVEPKNGKPDVSIQSAQSVTGQEDVLKSKGFTIVDTLHVEDSSVKPLVSKNFNKKVVEKMGLVYLVQYSPDQFKSSNIAKKELRKELMDLGFKVRYISENYKMMAIEGTATLQAVHPNQNWHYNMIKAPEAWAITSGSSSVKVAVLDTGIDHNHPSLANFVNTNLGRSFVGGNTMDVQGHGTHVAGTIASYGSVSGVMQSATLIPVKVLDNSGSGSLYGITQGILYAADIDADVINMSLGGGGYNQSMDAAVQTAVAQGTIVVAATGNDGASSISYPAAYSSVIAVGSVTSNRTRSSFSNYGSGLEVMAPGSNIYSTYPNSRYTSLSGTSMATPHVAGVAGLIRAANPDISVAQARQILRDTAQEAGSFTQYGYGIVDAHAAVVAASGGSGG

SEQ ID NO: 649 - DNA, 1239 bp, synthetic construct
  misc_feature 1..1239: note = Variant of serine peptidase from Bacillus sinesaloumensis
  source 1..1239: mol_type = other DNA
atggcagatcaagctagtcaagctaatggaaaccaggacgtcattgaaggcgagctgatcgtttcagtggaaccgaagaacggtaaacctgatgtgagcattcaaagtgcacaatccgtaacagggcaggaagacgtccttaaatcgaaaggctttacgatcgttgataccttgcatgtagaggatagcagcgtcaagccactcgtctcgaagaatttcaataagaaagtggtggagaagatgggactggtgtatcttgttcaatactctccggaccagtttaaaagttccaacattgcgaagaaagaactcagaaaagaattgatggatctgggctttaaagtccgctatataagcgaaaattacaagatgatggcgatcgaaggtacagccactcttcaggcagtacaccctaaccaaaactggcattataatatgattaaagctccggaagcgtgggctattacgtctggatcctctagcgttaaagtagcagtcctggatacagggatcgaccataatcacccatccttggccaacttcgtgaatactaatcttggccggtcgtttgttggaggaaacaccatggatgttcaaggtcatggcacacatgttgctggcacgattgcatcttatgggagtgtaagcggagtgatgcagagtgcgacactgatcccggtcaaagtgctcgataattctggcagcggggggctttacggtattacgcaaggcatattgtatgccgccgacatcgatgcggacgtcattaacatgtctctgggtggaggaggctataatcagagcatggatgaggctgttcaaacagcagttgctcagggaaccattgtagtagcagcgactggcaatgatggtgcatcgtcgatcagttatcctgctgcctacagcagcgtcattgcggtgggatctgtgacgtccaatcgtacacgatcctcgttttctaactatggatctgggcttgaagttatggcaccgggcagcaacatctacagtacgtatcctaattccagatatacatctttgagtggtacaagcatggctactccgcacgttgcgggcgtagctgggctcattcgcgcagccaacccagacatatctgtcgcgcaagcccgtcagattctgcgggataccgcgcaagaagcaggatcgttcacacagtacggctatggaatcgtcgatgctcatgccgccgttgttgctgcatccggtggtagcggcggc

SEQ ID NO: 650 - protein, 413 aa, synthetic construct
  REGION 1..413: note = Variant of serine peptidase from Bacillus sinesaloumensis
MADQASQANGNQDVIEGELIVSVEPKNGKPDVSIQSAQSVTGQEDVLKSKGFTIVDTLHVEDSSVKPLVSKNFNKKVVEKMGLVYLVQYSPDQFKSSNIAKKELRKELMDLGFKVRYISENYKMMAIEGTATLQAVHPNQNWHYNMIKAPEAWAITSGSSSVKVAVLDTGIDHNHPSLANFVNTNLGRSFVGGNTMDVQGHGTHVAGTIASYGSVSGVMQSATLIPVKVLDNSGSGGLYGITQGILYAADIDADVINMSLGGGGYNQSMDEAVQTAVAQGTIVVAATGNDGASSISYPAAYSSVIAVGSVTSNRTRSSFSNYGSGLEVMAPGSNIYSTYPNSRYTSLSGTSMATPHVAGVAGLIRAANPDISVAQARQILRDTAQEAGSFTQYGYGIVDAHAAVVAASGGSGG

SEQ ID NO: 651 - DNA, 1239 bp, synthetic construct
  misc_feature 1..1239: note = Variant of serine peptidase from Bacillus sinesaloumensis
  source 1..1239: mol_type = other DNA
atggcagatcaagctagtcaagctaatggaaaccaggacgtcattgaaggcgagctgatcgtttcagtggaaccgaagaacggtaaacctgatgtgagcattcaaagtgcacaatccgtaacagggcaggaagacgtccttaaatcgaaaggctttacgatcgttgataccttgcatgtagaggatagcagcgtcaagccactcgtctcgaagaatttcaataagaaagtggtggagaagatgggactggtgtatcttgttcaatactctccggaccagtttaaaagttccaacattgcgaagaaagaactcagaaaagaattgatggatctgggctttaaagtccgctatataagcgaaaattacaagatgatggcgatcgaaggtacagccactcttcaggcagtacaccctaaccaaaactggcattataatatgattaaagctccggaagcgtgggctattacgtctggatcctctagcgttaaagtagcagtcctggatacagggatcgaccataatcacccatccttggccaacttcgtgaatactaatcttggccggtcgtttgttggaggaaacaccatggatgttcaaggtcatggcacacatgttgctggcacgattgcatcttatgggagtgtaagcggagtgatgcagagtgcgacactgatcccggtcaaagtgctcgataattctggcagcgggtccctttacggtattacgcaaggcatattgtatgccgccgacatcgatgcggacgtcattaacatgtctctgggtggaggaggctataatcagagcatggatgaggctgttcaaacagcagttgctcagggaaccattgtagtagcagcgactggcaatgatggtgcatcgtcgatcagttatcctgctgcctacagcagcgtcattgcggtgggatctgtgacgtccaatcgtacacgatcctcgttttctaactatggatctgggcttgaagttatggcaccgggcagcaacatctacagtacgtatcctaattccagatatacatctttgagtggtacaagcatggctactccgcacgttgcgggcgtagctgggctcattcgcgcagccaacccagacatatctgtcgcgcaagcccgtcagattctgcgggataccgcgcaatgggcaggatcgttcacacagtacggctatggaatcgtcgatgctcatgccgccgttgttgctgcatccggtggtagcggcggc

SEQ ID NO: 652 - protein, 413 aa, synthetic construct
  REGION 1..413: note = Variant of serine peptidase from Bacillus sinesaloumensis
MADQASQANGNQDVIEGELIVSVEPKNGKPDVSIQSAQSVTGQEDVLKSKGFTIVDTLHVEDSSVKPLVSKNFNKKVVEKMGLVYLVQYSPDQFKSSNIAKKELRKELMDLGFKVRYISENYKMMAIEGTATLQAVHPNQNWHYNMIKAPEAWAITSGSSSVKVAVLDTGIDHNHPSLANFVNTNLGRSFVGGNTMDVQGHGTHVAGTIASYGSVSGVMQSATLIPVKVLDNSGSGSLYGITQGILYAADIDADVINMSLGGGGYNQSMDEAVQTAVAQGTIVVAATGNDGASSISYPAAYSSVIAVGSVTSNRTRSSFSNYGSGLEVMAPGSNIYSTYPNSRYTSLSGTSMATPHVAGVAGLIRAANPDISVAQARQILRDTAQWAGSFTQYGYGIVDAHAAVVAASGGSGG

SEQ ID NO: 653 - DNA, 1239 bp, synthetic construct
  misc_feature 1..1239: note = Variant of serine peptidase from Bacillus sinesaloumensis
  source 1..1239: mol_type = other DNA
atggcagatcaagctagtcaagctaatggaaaccaggacgtcattgaaggcgagctgatcgtttcagtggaaccgaagaacggtaaacctgatgtgagcattcaaagtgcacaatccgtaacagggcaggaagacgtccttaaatcgaaaggctttacgatcgttgataccttgcatgtagaggatagcagcgtcaagccactcgtctcgaagaatttcaataagaaagtggtggagaagatgggactggtgtatcttgttcaatactctccggaccagtttaaaagttccaacattgcgaagaaagaactcagaaaagaattgatggatctgggctttaaagtccgctatataagcgaaaattacaagatgatggcgatcgaaggtacagccactcttcaggcagtacaccctaaccaaaactggcattataatatgattaaagctccggaagcgtgggctattacgtctggatcctctagcgttaaagtagcagtcctggatacagggatcgaccataatcacccatccttggccaacttcgtgaatactaatcttggccggtcgtttgttggaggaaacaccatggatgttcaaggtcatggcacacatgttgctggcacgattgcatcttatgggagtgtaagcggagtgatgcagagtgcgacactgatcccggtcaaagtgctcgataattctggcagcgggtccctttacggtattacgcaaggcatattgtatgccgccgacatcgatgcggacgtcattaacatgtctctgggtggaggaggctataatcagagcatggatgaggctgttcaaacagcagttgctcagggaaccattgtagtagcagcgactggcaatgatggtgcatcgtcgatcagttatcctgctgcctacagcagcgtcattgcggtgggatctgtgacgtccaatcgtacacgatcctcgttttctaactatggatctgggcttgaagttatggcaccgggcagcaacatctacagtacgtatcctaattccagatatacatctttgagtggtacaagcatggctactccgcacgttgcgggcgtagctgggctcattcgcgcagccaacccagacatatctgtcgcgcaagcccgtcagattctgcggggtaccgcgcaagaagcaggatcgttcacacagtacggctatggaatcgtcgatgctcatgccgccgttgttgctgcatccggtggtagcggcggc

SEQ ID NO: 654 - protein, 413 aa, synthetic construct
  REGION 1..413: note = Variant of serine peptidase from Bacillus sinesaloumensis
MADQASQANGNQDVIEGELIVSVEPKNGKPDVSIQSAQSVTGQEDVLKSKGFTIVDTLHVEDSSVKPLVSKNFNKKVVEKMGLVYLVQYSPDQFKSSNIAKKELRKELMDLGFKVRYISENYKMMAIEGTATLQAVHPNQNWHYNMIKAPEAWAITSGSSSVKVAVLDTGIDHNHPSLANFVNTNLGRSFVGGNTMDVQGHGTHVAGTIASYGSVSGVMQSATLIPVKVLDNSGSGSLYGITQGILYAADIDADVINMSLGGGGYNQSMDEAVQTAVAQGTIVVAATGNDGASSISYPAAYSSVIAVGSVTSNRTRSSFSNYGSGLEVMAPGSNIYSTYPNSRYTSLSGTSMATPHVAGVAGLIRAANPDISVAQARQILRGTAQEAGSFTQYGYGIVDAHAAVVAASGGSGG

SEQ ID NO: 655 - DNA, 1239 bp, synthetic construct
  misc_feature 1..1239: note = Variant of serine peptidase from Bacillus sinesaloumensis
  source 1..1239: mol_type = other DNA
atggcagatcaagctagtcaagctaatggaaaccaggacgtcattgaaggcgagctgatcgtttcagtggaaccgaagaacggtaaacctgatgtgagcattcaaagtgcacaatccgtaacagggcaggaagacgtccttaaatcgaaaggctttacgatcgttgataccttgcatgtagaggatagcagcgtcaagccactcgtctcgaagaatttcaataagaaagtggtggagaagatgggactggtgtatcttgttcaatactctccggaccagtttaaaagttccaacattgcgaagaaagaactcagaaaagaattgatggatctgggctttaaagtccgctatataagcgaaaattacaagatgatggcgatcgaaggtacagccactcttcaggcagtacaccctaaccaaaactggcattataatatgattaaagctccggaagcgtgggctattacgtctggatcctctagcgttaaagtagcagtcctggatacagggatcgaccataatcacccatccttggccaacttcgtgaatactaatcttggccggtcgtttgttggaggaaacaccatggatgttcaaggtcatggcacacatgttgctggcacgattgcatcttatgggagtgtaagcggagtgatgcagagtgcgacactgatcccggtcaaagtgctcgataattctggcagcgggtccctttacggtattacgcaaggcatattgtatgccgccgacatcgatgcggacgtcattaacatgtctctgggtggaggaggctataatcagagcatggatgaggctgttcaaacagcagttgctcagagtaccattgtagtagcagcgactggcaatgatggtgcatcgtcgatcagttatcctgctgcctacagcagcgtcattgcggtgggatctgtgacgtccaatcgtacacgatcctcgttttctaactatggatctgggcttgaagttatggcaccgggcagcaacatctacagtacgtatcctaattccagatatacatctttgagtggtacaagcatggctactccgcacgttgcgggcgtagctgggctcattcgcgcagccaacccagacatatctgtcgcgcaagcccgtcagattctgcgggataccgcgcaagaagcaggatcgttcacacagtacggctatggaatcgtcgatgctcatgccgccgttgttgctgcatccggtggtagcggcggc

SEQ ID NO: 656 - protein, 413 aa, synthetic construct
  REGION 1..413: note = Variant of serine peptidase from Bacillus sinesaloumensis
MADQASQANGNQDVIEGELIVSVEPKNGKPDVSIQSAQSVTGQEDVLKSKGFTIVDTLHVEDSSVKPLVSKNFNKKVVEKMGLVYLVQYSPDQFKSSNIAKKELRKELMDLGFKVRYISENYKMMAIEGTATLQAVHPNQNWHYNMIKAPEAWAITSGSSSVKVAVLDTGIDHNHPSLANFVNTNLGRSFVGGNTMDVQGHGTHVAGTIASYGSVSGVMQSATLIPVKVLDNSGSGSLYGITQGILYAADIDADVINMSLGGGGYNQSMDEAVQTAVAQSTIVVAATGNDGASSISYPAAYSSVIAVGSVTSNRTRSSFSNYGSGLEVMAPGSNIYSTYPNSRYTSLSGTSMATPHVAGVAGLIRAANPDISVAQARQILRDTAQEAGSFTQYGYGIVDAHAAVVAASGGSGG

SEQ ID NO: 657 - DNA, 1239 bp, synthetic construct
  misc_feature 1..1239: note = Variant of serine peptidase from Bacillus sinesaloumensis
  source 1..1239: mol_type = other DNA
atggcagatcaagctagtcaagctaatggaaaccaggacgtcattgaaggcgagctgatcgtttcagtggaaccgaagaacggtaaacctgatgtgagcattcaaagtgcacaatccgtaacagggcaggaagacgtccttaaatcgaaaggctttacgatcgttgataccttgcatgtagaggatagcagcgtcaagccactcgtctcgaagaatttcaataagaaagtggtggagaagatgggactggtgtatcttgttcaatactctccggaccagtttaaaagttccaacattgcgaagaaagaactcagaaaagaattgatggatctgggctttaaagtccgctatataagcgaaaattacaagatgatggcgatcgaaggtacagccactcttcaggcagtacaccctaaccaaaactggcattataatatgattaaagctccggaagcgtgggctattacgtctggatcctctagcgttaaagtagcagtcctggatacagggatcgaccataatcacccatccttggccaacttcgtgaatactaatcttggccggtcgtttgttggaggaaacaccatggatgttcaaggtcatggcacacatgttgctggcacgattgcatcttatgggagtgtaagcggagtgatgcagagtgcgacactgatcccggtcaaagtgctcgataattctggcagcgggtccctttacggtattacgcaaggcatattgtatgccgccgacatcgatgcggacgtcattaacatgtctctgggtggaggaggctataatcagagcatggatgaggctgttcaaacagcagttgctcagggaaccattgtagtagcagcgactggcaatgatggtgcatcgtcgatcagttatcctgctgcctacagcagcgtcattgcggtgggatctgtgacgtccaatcgtacacgatcctcgttttctaactatggatctgggcttgaagttatggcaccgggcagcaacatctacagtacgtatcctaattccagatatacatctttgagtggtacaagcatggctactccgcacgttgcgggcgtagctgggctcattcgcgcagccaacccagacatatcttatgcgcaagcccgtcagattctgcgggataccgcgcaagaagcaggatcgttcacacagtacggctatggaatcgtcgatgctcatgccgccgttgttgctgcatccggtggtagcggcggc

SEQ ID NO: 658 - protein, 413 aa, synthetic construct
  REGION 1..413: note = Variant of serine peptidase from Bacillus sinesaloumensis
MADQASQANGNQDVIEGELIVSVEPKNGKPDVSIQSAQSVTGQEDVLKSKGFTIVDTLHVEDSSVKPLVSKNFNKKVVEKMGLVYLVQYSPDQFKSSNIAKKELRKELMDLGFKVRYISENYKMMAIEGTATLQAVHPNQNWHYNMIKAPEAWAITSGSSSVKVAVLDTGIDHNHPSLANFVNTNLGRSFVGGNTMDVQGHGTHVAGTIASYGSVSGVMQSATLIPVKVLDNSGSGSLYGITQGILYAADIDADVINMSLGGGGYNQSMDEAVQTAVAQGTIVVAATGNDGASSISYPAAYSSVIAVGSVTSNRTRSSFSNYGSGLEVMAPGSNIYSTYPNSRYTSLSGTSMATPHVAGVAGLIRAANPDISYAQARQILRDTAQEAGSFTQYGYGIVDAHAAVVAASGGSGG

SEQ ID NO: 659 - DNA, 1239 bp, synthetic construct
  misc_feature 1..1239: note = Variant of serine peptidase from Bacillus sinesaloumensis
  source 1..1239: mol_type = other DNA
atggcagatcaagctagtcaagctaatggaaaccaggacgtcattgaaggcgagctgatcgtttcagtggaaccgaagaacggtaaacctgatgtgagcattcaaagtgcacaatccgtaacagggcaggaagacgtccttaaatcgaaaggctttacgatcgttgataccttgcatgtagaggatagcagcgtcaagccactcgtctcgaagaatttcaataagaaagtggtggagaagatgggactggtgtatcttgttcaatactctccggaccagtttaaaagttccaacattgcgaagaaagaactcagaaaagaattgatggatctgggctttaaagtccgctatataagcgaaaattacaagatgatggcgatcgaaggtacagccactcttcaggcagtacaccctaaccaaaactggcattataatatgattaaagctccggaagcgtgggctattacgtctggatcctctagcgttaaagtagcagtcctggatacagggatcgaccataatcacccatccttggccaacttcgtgaatactaatcttggccggtcgtttgttggaggaaacaccatggatgttcaaggtcatggcacacatgttgctggcacgattgcatcttatgggagtgtaagcggagtgatgcagagtgcgacactgatcccggtcaaagtgctcgataattctggcagcgggtccctttacggtattacgcaaggcatattgtatgccgccgacatcgatgcggacgtcattaacatgtctctgggtggaggaggctataatcagagcatggatgaggctgttcaaacagcagttgctcagggaaccattgtagtagcagcgactggcaatgatggtgcatcgtcgatcagttatcctgctgcctacagcagcgtcattgcggtgggatctgtgacgtccaatcgtacacgatcctcgttttctaactatggatctgggcttgaaatgatggcaccgggcagcaacatctacagtacgtatcctaattccagatatacatctttgagtggtacaagcatggctactccgcacgttgcgggcgtagctgggctcattcgcgcagccaacccagacatatctgtcgcgcaagcccgtcagattctgcgggataccgcgcaagaagcaggatcgttcacacagtacggctatggaatcgtcgatgctcatgccgccgttgttgctgcatccggtggtagcggcggc

SEQ ID NO: 660 - protein, 413 aa, synthetic construct
  REGION 1..413: note = Variant of serine peptidase from Bacillus sinesaloumensis
MADQASQANGNQDVIEGELIVSVEPKNGKPDVSIQSAQSVTGQEDVLKSKGFTIVDTLHVEDSSVKPLVSKNFNKKVVEKMGLVYLVQYSPDQFKSSNIAKKELRKELMDLGFKVRYISENYKMMAIEGTATLQAVHPNQNWHYNMIKAPEAWAITSGSSSVKVAVLDTGIDHNHPSLANFVNTNLGRSFVGGNTMDVQGHGTHVAGTIASYGSVSGVMQSATLIPVKVLDNSGSGSLYGITQGILYAADIDADVINMSLGGGGYNQSMDEAVQTAVAQGTIVVAATGNDGASSISYPAAYSSVIAVGSVTSNRTRSSFSNYGSGLEMMAPGSNIYSTYPNSRYTSLSGTSMATPHVAGVAGLIRAANPDISVAQARQILRDTAQEAGSFTQYGYGIVDAHAAVVAASGGSGG

SEQ ID NO: 661 - DNA, 1239 bp, synthetic construct
  misc_feature 1..1239: note = Variant of serine peptidase from Bacillus sinesaloumensis
  source 1..1239: mol_type = other DNA
atggcagatcaagctagtcaagctaatggaaaccaggacgtcattgaaggcgagctgatcgtttcagtggaaccgaagaacggtaaacctgatgtgagcattcaaagtgcacaatccgtaacagggcaggaagacgtccttaaatcgaaaggctttacgatcgttgataccttgcatgtagaggatagcagcgtcaagccactcgtctcgaagaatttcaataagaaagtggtggagaagatgggactggtgtatcttgttcaatactctccggaccagtttaaaagttccaacattgcgaagaaagaactcagaaaagaattgatggatctgggctttaaagtccgctatataagcgaaaattacaagatgatggcgatcgaaggtacagccactcttcaggcagtacaccctaaccaaaactggcattataatatgattaaagctccggaagcgtgggctattacgaggggatcctctagcgttaaagtagcagtcctggatacagggatcgaccataatcacccatccttggccaacttcgtgaatactaatcttggccggtcgtttgttggaggaaacaccatggatgttcaaggtcatggcacacatgttgctggcacgattgcatcttatgggagtgtaagcggagtgatgcagagtgcgacactgatcccggtcaaagtgctcgataattctggcagcgggtccctttacggtattacgcaaggcatattgtatgccgccgacatcgatgcggacgtcattaacatgtctctgggtggaggaggctataatcagagcatggatgaggctgttcaaacagcagttgctcagggaaccattgtagtagcagcgactggcaatgatggtgcatcgtcgatcagttatcctgctgcctacagcagcgtcattgcggtgggatctgtgacgtccaatcgtacacgatcctcgttttctaactatggatctgggcttgaagttatggcaccgggcagcaacatctacagtacgtatcctaattccagatatacatctttgagtggtacaagcatggctactccgcacgttgcgggcgtagctgggctcattcgcgcagccaacccagacatatctgtcgcgcaagcccgtcagattctgcgggataccgcgcaagaagcaggatcgttcacacagtacggctatggaatcgtcgatgctcatgccgccgttgttgctgcatccggtggtagcggcggc

SEQ ID NO: 662 - protein, 413 aa, synthetic construct
  REGION 1..413: note = Variant of serine peptidase from Bacillus sinesaloumensis
MADQASQANGNQDVIEGELIVSVEPKNGKPDVSIQSAQSVTGQEDVLKSKGFTIVDTLHVEDSSVKPLVSKNFNKKVVEKMGLVYLVQYSPDQFKSSNIAKKELRKELMDLGFKVRYISENYKMMAIEGTATLQAVHPNQNWHYNMIKAPEAWAITRGSSSVKVAVLDTGIDHNHPSLANFVNTNLGRSFVGGNTMDVQGHGTHVAGTIASYGSVSGVMQSATLIPVKVLDNSGSGSLYGITQGILYAADIDADVINMSLGGGGYNQSMDEAVQTAVAQGTIVVAATGNDGASSISYPAAYSSVIAVGSVTSNRTRSSFSNYGSGLEVMAPGSNIYSTYPNSRYTSLSGTSMATPHVAGVAGLIRAANPDISVAQARQILRDTAQEAGSFTQYGYGIVDAHAAVVAASGGSGG

SEQ ID NO: 663 - DNA, 1239 bp, synthetic construct
  misc_feature 1..1239: note = Variant of serine peptidase from Bacillus sinesaloumensis
  source 1..1239: mol_type = other DNA
atggcagatcaagctagtcaagctaatggaaaccaggacgtcattgaaggcgagctgatcgtttcagtggaaccgaagaacggtaaacctgatgtgagcattcaaagtgcacaatccgtaacagggcaggaagacgtccttaaatcgaaaggctttacgatcgttgataccttgcatgtagaggatagcagcgtcaagccactcgtctcgaagaatttcaataagaaagtggtggagaagatgggactggtgtatcttgttcaatactctccggaccagtttaaaagttccaacattgcgaagaaagaactcagaaaagaattgatggatctgggctttaaagtccgctatataagcgaaaattacaagatgatggcgatcgaaggtacagccactcttcaggcagtacaccctaaccaaaactggcattataatatgattaaagctccggaagcgtgggctattacggctgggtcctctagcgttaaagtagcagtcctggatacagggatcgaccataatcacccatccttggccaacttcgtgaatactaatcttggccggtcgtttgttggaggaaacaccatggatgttcaaggtcatggcacacatgttgctggcacgattgcatcttatgggagtgtaagcggagtgatgcagagtgcgacactgatcccggtcaaagtgctcgataattctggcagcgggtccctttacggtattacgcaaggcatattgtatgccgccgacatcgatgcggacgtcattaacatgtctctgggtggaggaggctataatcagagcatggatgaggctgttcaaacagcagttgctcagggaaccattgtagtagcagcgactggcaatgatggtgcatcgtcgatcagttatcctgctgcctacagcagcgtcattgcggtgggatctgtgacgtccaatcgtacacgatcctcgttttctaactatggatctgggcttgaagttatggcaccgggcagcaacatctacagtacgtatcctaattccagatatacatctttgagtggtacaagcatggctactccgcacgttgcgggcgtagctgggctcattcgcgcagccaacccagacatatctgtcgcgcaagcccgtcagattctgcgggataccgcgcaagaagcaggatcgttcacacagtacggctatggaatcgtcgatgctcatgccgccgttgttgctgcatccggtggtagcggcggc

SEQ ID NO: 664 - protein, 413 aa, synthetic construct
  REGION 1..413: note = Variant of serine peptidase from Bacillus sinesaloumensis
MADQASQANGNQDVIEGELIVSVEPKNGKPDVSIQSAQSVTGQEDVLKSKGFTIVDTLHVEDSSVKPLVSKNFNKKVVEKMGLVYLVQYSPDQFKSSNIAKKELRKELMDLGFKVRYISENYKMMAIEGTATLQAVHPNQNWHYNMIKAPEAWAITAGSSSVKVAVLDTGIDHNHPSLANFVNTNLGRSFVGGNTMDVQGHGTHVAGTIASYGSVSGVMQSATLIPVKVLDNSGSGSLYGITQGILYAADIDADVINMSLGGGGYNQSMDEAVQTAVAQGTIVVAATGNDGASSISYPAAYSSVIAVGSVTSNRTRSSFSNYGSGLEVMAPGSNIYSTYPNSRYTSLSGTSMATPHVAGVAGLIRAANPDISVAQARQILRDTAQEAGSFTQYGYGIVDAHAAVVAASGGSGG

SEQ ID NO: 665 - DNA, 1239 bp, synthetic construct
  misc_feature 1..1239: note = Variant of serine peptidase from Bacillus sinesaloumensis
  source 1..1239: mol_type = other DNA
atggcagatcaagctagtcaagctaatggaaaccaggacgtcattgaaggcgagctgatcgtttcagtggaaccgaagaacggtaaacctgatgtgagcattcaaagtgcacaatccgtaacatggcaggaagacgtccttaaatcgaaaggctttacgatcgttgataccttgcatgtagaggatagcagcgtcaagccactcgtctcgaagaatttcaataagaaagtggtggagaagatgggactggtgtatcttgttcaatactctccggaccagtttaaaagttccaacattgcgaagaaagaactcagaaaagaattgatggatctgggctttaaagtccgctatataagcgaaaattacaagatgatggcgatcgaaggtacagccactcttcaggcagtacaccctaaccaaaactggcattataatatgattaaagctccggaagcgtgggctattacgtctggatcctctagcgttaaagtagcagtcctggatacagggatcgaccataatcacccatccttggccaacttcgtgaatactaatcttggccggtcgtttgttggaggaaacaccatggatgttcaaggtcatggcacacatgttgctggcacgattgcatcttatgggagtgtaagcggagtgatgcagagtgcgacactgatcccggtcaaagtgctcgataattctggcagcgggtccctttacggtattacgcaaggcatattgtatgccgccgacatcgatgcggacgtcattaacatgtctctgggtggaggaggctataatcagagcatggatgaggctgttcaaacagcagttgctcagggaaccattgtagtagcagcgactggcaatgatggtgcatcgtcgatcagttatcctgctgcctacagcagcgtcattgcggtgggatctgtgacgtccaatcgtacacgatcctcgttttctaactatggatctgggcttgaagttatggcaccgggcagcaacatctacagtacgtatcctaattccagatatacatctttgagtggtacaagcatggctactccgcacgttgcgggcgtagctgggctcattcgcgcagccaacccagacatatctgtcgcgcaagcccgtcagattctgcgggataccgcgcaagaagcaggatcgttcacacagtacggctatggaatcgtcgatgctcatgccgccgttgttgctgcatccggtggtagcggcggc

SEQ ID NO: 666 - protein, 413 aa, synthetic construct
  REGION 1..413: note = Variant of serine peptidase from Bacillus sinesaloumensis
MADQASQANGNQDVIEGELIVSVEPKNGKPDVSIQSAQSVTWQEDVLKSKGFTIVDTLHVEDSSVKPLVSKNFNKKVVEKMGLVYLVQYSPDQFKSSNIAKKELRKELMDLGFKVRYISENYKMMAIEGTATLQAVHPNQNWHYNMIKAPEAWAITSGSSSVKVAVLDTGIDHNHPSLANFVNTNLGRSFVGGNTMDVQGHGTHVAGTIASYGSVSGVMQSATLIPVKVLDNSGSGSLYGITQGILYAADIDADVINMSLGGGGYNQSMDEAVQTAVAQGTIVVAATGNDGASSISYPAAYSSVIAVGSVTSNRTRSSFSNYGSGLEVMAPGSNIYSTYPNSRYTSLSGTSMATPHVAGVAGLIRAANPDISVAQARQILRDTAQEAGSFTQYGYGIVDAHAAVVAASGGSGG

SEQ ID NO: 667 - DNA, 1239 bp, synthetic construct
  misc_feature 1..1239: note = Variant of serine peptidase from Bacillus sinesaloumensis
  source 1..1239: mol_type = other DNA
atggcagatcaagctagtcaagctaatggaaaccaggacgtcattgaaggcgagctgatcgtttcagtggaaccgaagaacggtaaacctgatgtgagcattcaaagtgcacaatccgtaacagggcaggaagacgtccttaaatcgaaaggctttacgatcgttgataccttgcatgtagaggatagcagcgtcaagccactcgtctcgaagaatttcaataagaaagtggtggagaagatgggactggtgtatcttgttcaatactctccggaccagtttaaaagttccaacattgcgaagaaagaactcagaaaagaattgatggatctgggctttaaagtccgctatataagcgaaaattacaagatgatggcgatcgaaggtacagccactcttcaggcagtacaccctaaccaaaactggcattataatatgattaaagctccggaagcgtgggctattacgtctggatcctctagcgttaaagtagcagtcctggatacagggatcgaccataatcacccatccttggccaacttcgtgaatactaatcttggccggtcgtttgttggaggaaacaccatggatgttcaaggtcatggcacacatgttgctggcacgattgcatcttatgggagtgtaagcggagtgatgcagagtgcgacactgatcccggtcaaagtgctcgataattctggcagcgggtccctttacggtattacggagggcatattgtatgccgccgacatcgatgcggacgtcattaacatgtctctgggtggaggaggctataatcagagcatggatgaggctgttcaaacagcagttgctcagggaaccattgtagtagcagcgactggcaatgatggtgcatcgtcgatcagttatcctgctgcctacagcagcgtcattgcggtgggatctgtgacgtccaatcgtacacgatcctcgttttctaactatggatctgggcttgaagttatggcaccgggcagcaacatctacagtacgtatcctaattccagatatacatctttgagtggtacaagcatggctactccgcacgttgcgggcgtagctgggctcattcgcgcagccaacccagacatatctgtcgcgcaagcccgtcagattctgcgggataccgcgcaagaagcaggatcgttcacacagtacggctatggaatcgtcgatgctcatgccgccgttgttgctgcatccggtggtagcggcggc

SEQ ID NO: 668 - protein, 413 aa, synthetic construct
  REGION 1..413: note = Variant of serine peptidase from Bacillus sinesaloumensis
MADQASQANGNQDVIEGELIVSVEPKNGKPDVSIQSAQSVTGQEDVLKSKGFTIVDTLHVEDSSVKPLVSKNFNKKVVEKMGLVYLVQYSPDQFKSSNIAKKELRKELMDLGFKVRYISENYKMMAIEGTATLQAVHPNQNWHYNMIKAPEAWAITSGSSSVKVAVLDTGIDHNHPSLANFVNTNLGRSFVGGNTMDVQGHGTHVAGTIASYGSVSGVMQSATLIPVKVLDNSGSGSLYGITEGILYAADIDADVINMSLGGGGYNQSMDEAVQTAVAQGTIVVAATGNDGASSISYPAAYSSVIAVGSVTSNRTRSSFSNYGSGLEVMAPGSNIYSTYPNSRYTSLSGTSMATPHVAGVAGLIRAANPDISVAQARQILRDTAQEAGSFTQYGYGIVDAHAAVVAASGGSGG

SEQ ID NO: 669 - DNA, 1239 bp, synthetic construct
  misc_feature 1..1239: note = Variant of serine peptidase from Bacillus sinesaloumensis
  source 1..1239: mol_type = other DNA
atggcagatcaagctagtcaagctaatggaaaccaggacgtcattgaaggcgagctgatcgtttcagtggaaccgaagaacggtaaacctgatgtgagcattcaaagtgcacaatccgtaacagggcaggaagacgtccttaaatcgaaaggctttacgatcgttgataccttgcatgtagaggatagcagcgtcaagccactcgtctcgaagaatttcaataagaaagtggtggagaagatgggactggtgtatcttgttcaatactctccggaccagtttaaaagttccaacattgcgaagaaagaactcagaaaagaattgatggatctgggctttaaagtccgctatataagcgaaaattacaagatgatggcgatcgaaggtacagccactcttcaggcagtacaccctaaccaaaactggcattataatatgattaaagctccggaagcgtgggctattacgtctggatcctctagcgttaaagtagcagtcctggatacagggatcgaccataatcacccatccttggccaacttcgtgaatactaatcttggccggtcgtttgttggaggaaacaccatggatgttcaaggtcatggcacacatgttgctggcacgattgcatcttatgggagtgtaagcggagtgatgcagagtgcgacactgatcccggtcaaagtgctcgataattctggcagcgggtccctttacggtattacgcaaggcatattgtatgccgccgacatcgatgcggacgtcattaacatgtctctgggtggaggaggctataatcagagcatggatgaggctgttcaaacagcagttgctcagggaaccattgtagtagcagcgactggcaatgatggtgcatcgtcgatcagttatcctgctgcctacagcagcgtcattgcggtgggatctgtgacgtccaatcgtacacgatcctcgttttctaactatggatctgggcttgaagttatggcaccgggcagcaacatctacagtacgtatcctaattccagatatacatctttgagtggtacaagcatggctactccgcacgttgcgggcgtagctgggctcattcgcgcagccaacccagacatatctgtcgcgcaagcccgtcagattctgcggtcgaccgcgcaagaagcaggatcgttcacacagtacggctatggaatcgtcgatgctcatgccgccgttgttgctgcatccggtggtagcggcggc

SEQ ID NO: 670 - protein, 413 aa, synthetic construct
  REGION 1..413: note = Variant of serine peptidase from Bacillus sinesaloumensis
MADQASQANGNQDVIEGELIVSVEPKNGKPDVSIQSAQSVTGQEDVLKSKGFTIVDTLHVEDSSVKPLVSKNFNKKVVEKMGLVYLVQYSPDQFKSSNIAKKELRKELMDLGFKVRYISENYKMMAIEGTATLQAVHPNQNWHYNMIKAPEAWAITSGSSSVKVAVLDTGIDHNHPSLANFVNTNLGRSFVGGNTMDVQGHGTHVAGTIASYGSVSGVMQSATLIPVKVLDNSGSGSLYGITQGILYAADIDADVINMSLGGGGYNQSMDEAVQTAVAQGTIVVAATGNDGASSISYPAAYSSVIAVGSVTSNRTRSSFSNYGSGLEVMAPGSNIYSTYPNSRYTSLSGTSMATPHVAGVAGLIRAANPDISVAQARQILRSTAQEAGSFTQYGYGIVDAHAAVVAASGGSGG

SEQ ID NO: 671 - DNA, 1239 bp, synthetic construct
  misc_feature 1..1239: note = Variant of serine peptidase from Bacillus sinesaloumensis
  source 1..1239: mol_type = other DNA
atggcagatcaagctagtcaagctaatggaaaccaggacgtcattgaaggcgagctgatcgtttcagtggaaccgaagaacggtaaacctgatgtgagcattcaaagtgcacaatccgtaacagggcaggaagacgtccttaaatcgaaaggctttacgatcgttgataccttgcatgtagaggatagcagcgtcaagccactcgtctcgaagaatttcaataagaaagtggtggagaagatgggactggtgtatcttgttcaatactctccggaccagtttaaaagttccaacattgcgaagaaagaactcagaaaagaattgatggatctgggctttaaagtccgctatataagcgaaaattacaagatgatggcgatcgaaggtacagccactcttcaggcagtacaccctaaccaaaactggcattataatatgattaaagctccggaagcgtgggctattacgtctggatcctctagcgttaaagtagcagtcctggatacagggatcgaccataatcacccatccttggccaacttcgtgaatactaatcttggccggtcgtttgttggaggaaacaccatggatgttcaaggtcatggcacacatgttgctggcacgattgcatcttatgggagtgtaagcggagtgatgcagagtgcgacactgatcccggtcaaagtgctcgataattctggcagcgggtccctttacggtattacgcaaggcatattgtatgccgccgacatcgatgcggacgtcattaacatgtctctgggtggaggaggctataatcagagcatggatgaggctgttcaaacagcagttgctcagggaaccattgtagtagcagcgactggcaatgatggtgcatcgtcgatcagttatcctgctgcctacagcagcgtcattgcggtgggatctgtgacgtccaatcgtacacgatcctcgttttctaactatggatctgggcttgaagttatggcaccgggcagcaacatctacagtacgtatcctaattccagatatacatctttgagtggtacaagcatggctactccgcacgttgcgggcgtagctgggctcattcgcgcagccaacccagacatatctgtcgcgcaagcccgtcagattctgcgggataccgcgcaagaagcaggatcgttcttgcagtacggctatggaatcgtcgatgctcatgccgccgttgttgctgcatccggtggtagcggcggc

SEQ ID NO: 672 - protein, 413 aa, synthetic construct
  REGION 1..413: note = Variant of serine peptidase from Bacillus sinesaloumensis
MADQASQANGNQDVIEGELIVSVEPKNGKPDVSIQSAQSVTGQEDVLKSKGFTIVDTLHVEDSSVKPLVSKNFNKKVVEKMGLVYLVQYSPDQFKSSNIAKKELRKELMDLGFKVRYISENYKMMAIEGTATLQAVHPNQNWHYNMIKAPEAWAITSGSSSVKVAVLDTGIDHNHPSLANFVNTNLGRSFVGGNTMDVQGHGTHVAGTIASYGSVSGVMQSATLIPVKVLDNSGSGSLYGITQGILYAADIDADVINMSLGGGGYNQSMDEAVQTAVAQGTIVVAATGNDGASSISYPAAYSSVIAVGSVTSNRTRSSFSNYGSGLEVMAPGSNIYSTYPNSRYTSLSGTSMATPHVAGVAGLIRAANPDISVAQARQILRDTAQEAGSFLQYGYGIVDAHAAVVAASGGSGG

SEQ ID NO: 673 - DNA, 1239 bp, synthetic construct
  misc_feature 1..1239: note = Variant of serine peptidase from Bacillus sinesaloumensis
  source 1..1239: mol_type = other DNA
atggcagatcaagctagtcaagctaatggaaaccaggacgtcattgaaggcgagctgatcgtttcagtggaaccgaagaacggtaaacctgatgtgagcattcaaagtgcacaatccgtaacagggcaggaagacgtccttaaatcgaaaggctttacgatcgttgataccttgcatgtagaggatagcagcgtcaagccactcgtctcgaagaatttcaataagaaagtggtggagaagatgggactggtgtatcttgttcaatactctccggaccagtttaaaagttccaacattgcgaagaaagaactcagaaaagaattgatggatctgggctttaaagtccgctatataagcgaaaattacaagatgatggcgatcgaaggtacagccactcttcaggcagtacaccctaaccaaaactggcattataatatgattaaagctccggaagcgtgggctattacgtctggatcctctagcgttaaagtagcagtcctggatacagggatcgaccataatcacccatccttggccaacttcgtgaatactaatcttggccggtcgtttgttggaggaaacaccatggatgttcaaggtcatggcacacatgttgctggcacgattgcatcttatgggagtgtaagcggagtgatgcagagtgcgacactgatcccggtcaaagtgctcgataattctggcagcgggtccctttacggtattacgcaaggcatattgtatgccgccgacatcgatgcggacgtcattaacatgtctctgggtggaggaggctataatcagagcatggatgaggctgttcaaacagcagttgctcagggaaccattgtagtagcagcgactggcaatgatggtgcatcgtcgatcagttatcctgctgcctacagcagcgtcattgcggtgggatctgtgacgtccaatcgtacacgatcctcgttttctaactatggatctgggcttgaagttatggcaccgggcagcaacatctacagtacgtatcctaattccagatatacatctttgagtggtacaagcatggctactccgcacgttgcgggcgtagctgggctcattcgcgcagccaacccagacatatctgtcgcgcaagcccgtcagattctgaatgataccgcgcaagaagcaggatcgttcacacagtacggctatggaatcgtcgatgctcatgccgccgttgttgctgcatccggtggtagcggcggc

SEQ ID NO: 674 - protein, 413 aa, synthetic construct
  REGION 1..413: note = Variant of serine peptidase from Bacillus sinesaloumensis
MADQASQANGNQDVIEGELIVSVEPKNGKPDVSIQSAQSVTGQEDVLKSKGFTIVDTLHVEDSSVKPLVSKNFNKKVVEKMGLVYLVQYSPDQFKSSNIAKKELRKELMDLGFKVRYISENYKMMAIEGTATLQAVHPNQNWHYNMIKAPEAWAITSGSSSVKVAVLDTGIDHNHPSLANFVNTNLGRSFVGGNTMDVQGHGTHVAGTIASYGSVSGVMQSATLIPVKVLDNSGSGSLYGITQGILYAADIDADVINMSLGGGGYNQSMDEAVQTAVAQGTIVVAATGNDGASSISYPAAYSSVIAVGSVTSNRTRSSFSNYGSGLEVMAPGSNIYSTYPNSRYTSLSGTSMATPHVAGVAGLIRAANPDISVAQARQILNDTAQEAGSFTQYGYGIVDAHAAVVAASGGSGG

SEQ ID NO: 675 - DNA, 1239 bp, synthetic construct
  misc_feature 1..1239: note = Variant of serine peptidase from Bacillus sinesaloumensis
  source 1..1239: mol_type = other DNA
atggcagatcaagctagtcaagctaatggaaaccaggacgtcattgaaggcgagctgatcgtttcagtggaaccgaagaacggtaaacctgatgtgagcattcaaagtgcacaatccgtaacagggcaggaagacgtccttaaatcgaaaggctttacgatcgttgataccttgcatgtagaggatagcagcgtcaagccactcgtctcgaagaatttcaataagaaagtggtggagaagatgggactggtgtatcttgttcaatactctccggaccagtttaaaagttccaacattgcgaagaaagaactcagaaaagaattgatggatctgggctttaaagtccgctatataagcgaaaattacaagatgatggcgatcgaaggtacagccactcttcaggcagtacaccctaaccaaaactggcattataatatgattaaagctccggaagcgtgggctattacgtctggatcctctagcgttaaagtagcagtcctggatacagggatcgaccataatcacccatccttggccaacttcgtgaatactaatcttggccggtcgtttgttggaggaaacaccatggatgttcaaggtcatggcacacatgttgctggcacgattgcatcttatgggagtgtaagcggagtgatgcagagtgcgacactgatcccggtcaaagtgctcgataattctggcagcgggtccctttacggtattacgatgggcatattgtatgccgccgacatcgatgcggacgtcattaacatgtctctgggtggaggaggctataatcagagcatggatgaggctgttcaaacagcagttgctcagggaaccattgtagtagcagcgactggcaatgatggtgcatcgtcgatcagttatcctgctgcctacagcagcgtcattgcggtgggatctgtgacgtccaatcgtacacgatcctcgttttctaactatggatctgggcttgaagttatggcaccgggcagcaacatctacagtacgtatcctaattccagatatacatctttgagtggtacaagcatggctactccgcacgttgcgggcgtagctgggctcattcgcgcagccaacccagacatatctgtcgcgcaagcccgtcagattctgcgggataccgcgcaagaagcaggatcgttcacacagtacggctatggaatcgtcgatgctcatgccgccgttgttgctgcatccggtggtagcggcggc

SEQ ID NO: 676 - protein, 413 aa, synthetic construct
  REGION 1..413: note = Variant of serine peptidase from Bacillus sinesaloumensis
MADQASQANGNQDVIEGELIVSVEPKNGKPDVSIQSAQSVTGQEDVLKSKGFTIVDTLHVEDSSVKPLVSKNFNKKVVEKMGLVYLVQYSPDQFKSSNIAKKELRKELMDLGFKVRYISENYKMMAIEGTATLQAVHPNQNWHYNMIKAPEAWAITSGSSSVKVAVLDTGIDHNHPSLANFVNTNLGRSFVGGNTMDVQGHGTHVAGTIASYGSVSGVMQSATLIPVKVLDNSGSGSLYGITMGILYAADIDADVINMSLGGGGYNQSMDEAVQTAVAQGTIVVAATGNDGASSISYPAAYSSVIAVGSVTSNRTRSSFSNYGSGLEVMAPGSNIYSTYPNSRYTSLSGTSMATPHVAGVAGLIRAANPDISVAQARQILRDTAQEAGSFTQYGYGIVDAHAAVVAASGGSGG

SEQ ID NO: 677 - DNA, 1239 bp, synthetic construct
  misc_feature 1..1239: note = Variant of serine peptidase from Bacillus sinesaloumensis
  source 1..1239: mol_type = other DNA
atggcagatcaagctagtcaagctaatggaaaccaggacgtcattgaaggcgagctgatcgtttcagtggaaccgaagaacggtaaacctgatgtgagcattcaaagtgcacaatccgtaacagggcaggaagacgtccttaaatcgaaaggctttacgatcgttgataccttgcatgtagaggatagcagcgtcaagccactcgtctcgaagaatttcaataagaaagtggtggagaagatgggactggtgtatcttgttcaatactctccggaccagtttaaaagttccaacattgcgaagaaagaactcagaaaagaattgatggatctgggctttaaagtccgctatataagcgaaaattacaagatgatggcgatcgaaggtacagccactcttcaggcagtacaccctaaccaaaactggcattataatatgattaaagctccggaagcgtgggctattacgtctggatcctctagcgttaaagtagcagtcctggatacagggatcgaccataatcacccatccttggccaacttcgtgaatactaatcttggccggtcgtttgttggaggaaacaccatggatgttcaaggtcatggcacacatgttgctggcacgattgcatcttatgggagtgtaagcggagtgatgcagagtgcgacactgatcccggtcaaagtgctcgataattctggcagcgggtccctttacggtattacgcaaggcatattgtatgccgccgacatcgatgcggacgtcattaacatgtctctgggtggaggaggctataatcagagcatggatgaggctgttcaagtggcagttgctcagggaaccattgtagtagcagcgactggcaatgatggtgcatcgtcgatcagttatcctgctgcctacagcagcgtcattgcggtgggatctgtgacgtccaatcgtacacgatcctcgttttctaactatggatctgggcttgaagttatggcaccgggcagcaacatctacagtacgtatcctaattccagatatacatctttgagtggtacaagcatggctactccgcacgttgcgggcgtagctgggctcattcgcgcagccaacccagacatatctgtcgcgcaagcccgtcagattctgcgggataccgcgcaagaagcaggatcgttcacacagtacggctatggaatcgtcgatgctcatgccgccgttgttgctgcatccggtggtagcggcggc

SEQ ID NO: 678 - protein, 413 aa, synthetic construct
  REGION 1..413: note = Variant of serine peptidase from Bacillus sinesaloumensis
MADQASQANGNQDVIEGELIVSVEPKNGKPDVSIQSAQSVTGQEDVLKSKGFTIVDTLHVEDSSVKPLVSKNFNKKVVEKMGLVYLVQYSPDQFKSSNIAKKELRKELMDLGFKVRYISENYKMMAIEGTATLQAVHPNQNWHYNMIKAPEAWAITSGSSSVKVAVLDTGIDHNHPSLANFVNTNLGRSFVGGNTMDVQGHGTHVAGTIASYGSVSGVMQSATLIPVKVLDNSGSGSLYGITQGILYAADIDADVINMSLGGGGYNQSMDEAVQVAVAQGTIVVAATGNDGASSISYPAAYSSVIAVGSVTSNRTRSSFSNYGSGLEVMAPGSNIYSTYPNSRYTSLSGTSMATPHVAGVAGLIRAANPDISVAQARQILRDTAQEAGSFTQYGYGIVDAHAAVVAASGGSGG

SEQ ID NO: 679 - DNA, 1239 bp, synthetic construct
  misc_feature 1..1239: note = Variant of serine peptidase from Bacillus sinesaloumensis
  source 1..1239: mol_type = other DNA
atggcagatcaagctagtcaagctaatggaaaccaggacgtcattgaaggcgagctgatcgtttcagtggaaccgaagaacggtaaacctgatgtgagcattcaaagtgcacaatccgtaacagggcaggaagacgtccttaaatcgaaaggctttacgatcgttgataccttgcatgtagaggatagcagcgtcaagccactcgtctcgaagaatttcaataagaaagtggtggagaagatgggactggtgtatcttgttcaatactctccggaccagtttaaaagttccaacattgcgaagaaagaactcagaaaagaattgatggatctgggctttaaagtccgctatataagcgaaaattacaagatgatggcgatcgaaggtacagccactcttcaggcagtacaccctaaccaaaactggcattataatatgattaaagctccggaagcgtgggctattacgattggatcctctagcgttaaagtagcagtcctggatacagggatcgaccataatcacccatccttggccaacttcgtgaatactaatcttggccggtcgtttgttggaggaaacaccatggatgttcaaggtcatggcacacatgttgctggcacgattgcatcttatgggagtgtaagcggagtgatgcagagtgcgacactgatcccggtcaaagtgctcgataattctggcagcgggtccctttacggtattacgcaaggcatattgtatgccgccgacatcgatgcggacgtcattaacatgtctctgggtggaggaggctataatcagagcatggatgaggctgttcaaacagcagttgctcagggaaccattgtagtagcagcgactggcaatgatggtgcatcgtcgatcagttatcctgctgcctacagcagcgtcattgcggtgggatctgtgacgtccaatcgtacacgatcctcgttttctaactatggatctgggcttgaagttatggcaccgggcagcaacatctacagtacgtatcctaattccagatatacatctttgagtggtacaagcatggctactccgcacgttgcgggcgtagctgggctcattcgcgcagccaacccagacatatctgtcgcgcaagcccgtcagattctgcgggataccgcgcaagaagcaggatcgttcacacagtacggctatggaatcgtcgatgctcatgccgccgttgttgctgcatccggtggtagcggcggc

SEQ ID NO: 680 - protein, 413 aa, synthetic construct
  REGION 1..413: note = Variant of serine peptidase from Bacillus sinesaloumensis
MADQASQANGNQDVIEGELIVSVEPKNGKPDVSIQSAQSVTGQEDVLKSKGFTIVDTLHVEDSSVKPLVSKNFNKKVVEKMGLVYLVQYSPDQFKSSNIAKKELRKELMDLGFKVRYISENYKMMAIEGTATLQAVHPNQNWHYNMIKAPEAWAITIGSSSVKVAVLDTGIDHNHPSLANFVNTNLGRSFVGGNTMDVQGHGTHVAGTIASYGSVSGVMQSATLIPVKVLDNSGSGSLYGITQGILYAADIDADVINMSLGGGGYNQSMDEAVQTAVAQGTIVVAATGNDGASSISYPAAYSSVIAVGSVTSNRTRSSFSNYGSGLEVMAPGSNIYSTYPNSRYTSLSGTSMATPHVAGVAGLIRAANPDISVAQARQILRDTAQEAGSFTQYGYGIVDAHAAVVAASGGSGG

SEQ ID NO: 681 - DNA, 1239 bp, synthetic construct
  misc_feature 1..1239: note = Variant of serine peptidase from Bacillus sinesaloumensis
  source 1..1239: mol_type = other DNA
atggcagatcaagctagtcaagctaatggaaaccaggacgtcattgaaggcgagctgatcgtttcagtggaaccgaagaacggtaaacctgatgtgagcattcaaagtgcacaatccgtaacagggcaggaagacgtccttaaatcgaaaggctttacgatcgttgataccttgcatgtagaggatagcagcgtcaagccactcgtctcgaagaatttcaataagaaagtggtggagaagatgggactggtgtatcttgttcaatactctccggaccagtttaaaagttccaacattgcgaagaaagaactcagaaaagaattgatggatctgggctttaaagtccgctatataagcgaaaattacaagatgatggcgatcgaaggtacagccactcttcaggcagtacaccctaaccaaaactggcattataatatgattaaagctccggaagcgtgggctattacgtctggatcctctagcgttaaagtagcagtcctggatacagggatcgaccataatcacccatccttggccaacttcgtgaatactaatcttggccggtcgtttgttggaggaaacaccatggatgttcaaggtcatggcacacatgttgctggcacgattgcatcttatgggagtgtaagcggagtgatgcagagtgcgacactgatcccggtcaaagtgctcgataattctggcagcgggtccctttacggtattacgcaaggcatattgtatgccgccgacatcgatgcggacgtcattaacatgtctctgggtggaggaggctataatcagagcatggatgaggctgttcaaacagcagttgctcagggaaccattgtagtagcagcgactggcaatgatggtgcatcgtcgatcagttatcctgctgcctacagcagcgtcattgcggtgggatctgtgacgtccaatcgtacacgatcctcgttttctaactatggatctgggcttgaagttatggcaccgggcagcaacatctacagtacgtatcctaattccagatatacatctttgagtggtacaagcatggctactccgcacgttgcgggcgtagctgggctcattcgcgcagccaacccagacatatcttcggcgcaagcccgtcagattctgcgggataccgcgcaagaagcaggatcgttcacacagtacggctatggaatcgtcgatgctcatgccgccgttgttgctgcatccggtggtagcggcggc

SEQ ID NO: 682 - protein, 413 aa, synthetic construct
  REGION 1..413: note = Variant of serine peptidase from Bacillus sinesaloumensis
MADQASQANGNQDVIEGELIVSVEPKNGKPDVSIQSAQSVTGQEDVLKSKGFTIVDTLHVEDSSVKPLVSKNFNKKVVEKMGLVYLVQYSPDQFKSSNIAKKELRKELMDLGFKVRYISENYKMMAIEGTATLQAVHPNQNWHYNMIKAPEAWAITSGSSSVKVAVLDTGIDHNHPSLANFVNTNLGRSFVGGNTMDVQGHGTHVAGTIASYGSVSGVMQSATLIPVKVLDNSGSGSLYGITQGILYAADIDADVINMSLGGGGYNQSMDEAVQTAVAQGTIVVAATGNDGASSISYPAAYSSVIAVGSVTSNRTRSSFSNYGSGLEVMAPGSNIYSTYPNSRYTSLSGTSMATPHVAGVAGLIRAANPDISSAQARQILRDTAQEAGSFTQYGYGIVDAHAAVVAASGGSGG

SEQ ID NO: 683 - DNA, 1239 bp, synthetic construct
  misc_feature 1..1239: note = Variant of serine peptidase from Bacillus sinesaloumensis
  source 1..1239: mol_type = other DNA
atggcagatcaagctagtcaagctaatggaaaccaggacgtcattgaaggcgagctgatcgtttcagtggaaccgaagaacggtaaacctgatgtgagcattcaaagtgcacaatccgtaacagggcaggaagacgtccttaaatcgaaaggctttacgatcgttgataccttgcatgtagaggatagcagcgtcaagccactcgtctcgaagaatttcaataagaaagtggtggagaagatgggactggtgtatcttgttcaatactctccggaccagtttaaaagttccaacattgcgaagaaagaactcagaaaagaattgatggatctgggctttaaagtccgctatataagcgaaaattacaagatgatggcgatcgaaggtacagccactcttcaggcagtacaccctaaccaaaactggcattataatatgattaaagctccggaagcgtgggctattacgactgggtcctctagcgttaaagtagcagtcctggatacagggatcgaccataatcacccatccttggccaacttcgtgaatactaatcttggccggtcgtttgttggaggaaacaccatggatgttcaaggtcatggcacacatgttgctggcacgattgcatcttatgggagtgtaagcggagtgatgcagagtgcgacactgatcccggtcaaagtgctcgataattctggcagcgggtccctttacggtattacgcaaggcatattgtatgccgccgacatcgatgcggacgtcattaacatgtctctgggtggaggaggctataatcagagcatggatgaggctgttcaaacagcagttgctcagggaaccattgtagtagcagcgactggcaatgatggtgcatcgtcgatcagttatcctgctgcctacagcagcgtcattgcggtgggatctgtgacgtccaatcgtacacgatcctcgttttctaactatggatctgggcttgaagttatggcaccgggcagcaacatctacagtacgtatcctaattccagatatacatctttgagtggtacaagcatggctactccgcacgttgcgggcgtagctgggctcattcgcgcagccaacccagacatatctgtcgcgcaagcccgtcagattctgcgggataccgcgcaagaagcaggatcgttcacacagtacggctatggaatcgtcgatgctcatgccgccgttgttgctgcatccggtggtagcggcggc

SEQ ID NO: 684 - protein, 413 aa, synthetic construct
  REGION 1..413: note = Variant of serine peptidase from Bacillus sinesaloumensis
MADQASQANGNQDVIEGELIVSVEPKNGKPDVSIQSAQSVTGQEDVLKSKGFTIVDTLHVEDSSVKPLVSKNFNKKVVEKMGLVYLVQYSPDQFKSSNIAKKELRKELMDLGFKVRYISENYKMMAIEGTATLQAVHPNQNWHYNMIKAPEAWAITTGSSSVKVAVLDTGIDHNHPSLANFVNTNLGRSFVGGNTMDVQGHGTHVAGTIASYGSVSGVMQSATLIPVKVLDNSGSGSLYGITQGILYAADIDADVINMSLGGGGYNQSMDEAVQTAVAQGTIVVAATGNDGASSISYPAAYSSVIAVGSVTSNRTRSSFSNYGSGLEVMAPGSNIYSTYPNSRYTSLSGTSMATPHVAGVAGLIRAANPDISVAQARQILRDTAQEAGSFTQYGYGIVDAHAAVVAASGGSGG

SEQ ID NO: 685 - DNA, 1239 bp, synthetic construct
  misc_feature 1..1239: note = Variant of serine peptidase from Bacillus sinesaloumensis
  source 1..1239: mol_type = other DNA
atggcagatcaagctagtcaagctaatggaaaccaggacgtcattgaaggcgagctgatcgtttcagtggaaccgaagaacggtaaacctgatgtgagcattcaaagtgcacaatccgtaacagggcaggaagacgtccttaaatcgaaaggctttacgatcgttgataccttgcatgtagaggatagcagcgtcaagccactcgtctcgaagaatttcaataagaaagtggtggagaagatgggactggtgtatcttgttcaatactctccggaccagtttaaaagttccaacattgcgaagaaagaactcagaaaagaattgatggatctgggctttaaagtccgctatataagcgaaaattacaagatgatggcgatcgaaggtacagccactcttcaggcagtacaccctaaccaaaactggcattataatatgattaaagctccggaagcgtgggctattacgtctggatcctctagcgttaaagtagcagtcctggatacagggatcgaccataatcacccatccttggccaacttcgtgaatactaatcttggccggtcgtttgttggaggaaacaccatggatgttcaaggtcatggcacacatgttgctggcacgattgcatcttatgggagtgtaagcggagtgatgcagagtgcgacactgatcccggtcaaagtgctcgataattctggcagcgggtccctttacggtattacgcaaggcatattgtatgccgccgacatcgatgcggacgtcattaacatgtctctgggtggaggaggctataatcagagcatggatgaggctgttcaaacagcagttgctcaggataccattgtagtagcagcgactggcaatgatggtgcatcgtcgatcagttatcctgctgcctacagcagcgtcattgcggtgggatctgtgacgtccaatcgtacacgatcctcgttttctaactatggatctgggcttgaagttatggcaccgggcagcaacatctacagtacgtatcctaattccagatatacatctttgagtggtacaagcatggctactccgcacgttgcgggcgtagctgggctcattcgcgcagccaacccagacatatctgtcgcgcaagcccgtcagattctgcgggataccgcgcaagaagcaggatcgttcacacagtacggctatggaatcgtcgatgctcatgccgccgttgttgctgcatccggtggtagcggcggc

SEQ ID NO: 686 - protein, 413 aa, synthetic construct
  REGION 1..413: note = Variant of serine peptidase from Bacillus sinesaloumensis
MADQASQANGNQDVIEGELIVSVEPKNGKPDVSIQSAQSVTGQEDVLKSKGFTIVDTLHVEDSSVKPLVSKNFNKKVVEKMGLVYLVQYSPDQFKSSNIAKKELRKELMDLGFKVRYISENYKMMAIEGTATLQAVHPNQNWHYNMIKAPEAWAITSGSSSVKVAVLDTGIDHNHPSLANFVNTNLGRSFVGGNTMDVQGHGTHVAGTIASYGSVSGVMQSATLIPVKVLDNSGSGSLYGITQGILYAADIDADVINMSLGGGGYNQSMDEAVQTAVAQDTIVVAATGNDGASSISYPAAYSSVIAVGSVTSNRTRSSFSNYGSGLEVMAPGSNIYSTYPNSRYTSLSGTSMATPHVAGVAGLIRAANPDISVAQARQILRDTAQEAGSFTQYGYGIVDAHAAVVAASGGSGG

SEQ ID NO: 687 - DNA, 1239 bp, synthetic construct
  misc_feature 1..1239: note = Variant of serine peptidase from Bacillus sinesaloumensis
  source 1..1239: mol_type = other DNA
atggcagatcaagctagtcaagctaatggaaaccaggacgtcattgaaggcgagctgatcgtttcagtggaaccgaagaacggtaaacctgatgtgagcattcaaagtgcacaatccgtaacagggcaggaagacgtccttaaatcgaaaggctttacgatcgttgataccttgcatgtagaggatagcagcgtcaagccactcgtctcgaagaatttcaataagaaagtggtggagaagatgggactggtgtatcttgttcaatactctccggaccagtttaaaagttccaacattgcgaagaaagaactcagaaaagaattgatggatctgggctttaaagtccgctatataagcgaaaattacaagatgatggcgatcgaaggtacagccactcttcaggcagtacaccctaaccaaaactggcattataatatgattaaagctccggaagcgtgggctattacgtctggatcctctagcgttaaagtagcagtcctggatacagggatcgaccataatcacccatccttggccaacttcgtgaatactaatcttggccggtcgtttgttggaggaaacaccatggatgttcaaggtcatggcacacatgttgctggcacgattgcatcttatgggagtgtaagcggagtgatgcagagtgcgacactgatcccggtcaaagtgctcgataattctggcagcgggtccctttacggtattacgcaaggcatattgtatgccggggacatcgatgcggacgtcattaacatgtctctgggtggaggaggctataatcagagcatggatgaggctgttcaaacagcagttgctcagggaaccattgtagtagcagcgactggcaatgatggtgcatcgtcgatcagttatcctgctgcctacagcagcgtcattgcggtgggatctgtgacgtccaatcgtacacgatcctcgttttctaactatggatctgggcttgaagttatggcaccgggcagcaacatctacagtacgtatcctaattccagatatacatctttgagtggtacaagcatggctactccgcacgttgcgggcgtagctgggctcattcgcgcagccaacccagacatatctgtcgcgcaagcccgtcagattctgcgggataccgcgcaagaagcaggatcgttcacacagtacggctatggaatcgtcgatgctcatgccgccgttgttgctgcatccggtggtagcggcggc

SEQ ID NO: 688 - protein, 413 aa, synthetic construct
  REGION 1..413: note = Variant of serine peptidase from Bacillus sinesaloumensis
MADQASQANGNQDVIEGELIVSVEPKNGKPDVSIQSAQSVTGQEDVLKSKGFTIVDTLHVEDSSVKPLVSKNFNKKVVEKMGLVYLVQYSPDQFKSSNIAKKELRKELMDLGFKVRYISENYKMMAIEGTATLQAVHPNQNWHYNMIKAPEAWAITSGSSSVKVAVLDTGIDHNHPSLANFVNTNLGRSFVGGNTMDVQGHGTHVAGTIASYGSVSGVMQSATLIPVKVLDNSGSGSLYGITQGILYAGDIDADVINMSLGGGGYNQSMDEAVQTAVAQGTIVVAATGNDGASSISYPAAYSSVIAVGSVTSNRTRSSFSNYGSGLEVMAPGSNIYSTYPNSRYTSLSGTSMATPHVAGVAGLIRAANPDISVAQARQILRDTAQEAGSFTQYGYGIVDAHAAVVAASGGSGG

SEQ ID NO: 689 - DNA, 1239 bp, synthetic construct
  misc_feature 1..1239: note = Variant of serine peptidase from Bacillus sinesaloumensis
  source 1..1239: mol_type = other DNA
atggcagatcaagctagtcaagctaatggaaaccaggacgtcattgaaggcgagctgatcgtttcagtggaaccgaagaacggtaaacctgatgtgagcattcaaagtgcacaatccgtaacagggcaggaagacgtccttaaatcgaaaggctttacgatcgttgataccttgcatgtagaggatagcagcgtcaagccactcgtctcgaagaatttcaataagaaagtggtggagaagatgggactggtgtatcttgttcaatactctccggaccagtttaaaagttccaacattgcgaagaaagaactcagaaaagaattgatggatctgggctttaaagtccgctatataagcgaaaattacaagatgatggcgatcgaaggtacagccactcttcaggcagtacaccctaaccaaaactggcattataatatgattaaagctccggaagcgtgggctattacgtctggatcctctagcgttaaagtagcagtcctggatacagggatcgaccataatcacccatccttggccaacttcgtgaatactaatcttggccggtcgtttgttggaggaaacaccatggatgttcaaggtcatggcacacatgttgctggcacgattgcatcttatgggagtgtaagcggagtgatgcagagtgcgacactgatcccggtcaaagtgctcgataattctggcagcgggtcccttctgggtattacgcaaggcatattgtatgccgccgacatcgatgcggacgtcattaacatgtctctgggtggaggaggctataatcagagcatggatgaggctgttcaaacagcagttgctcagggaaccattgtagtagcagcgactggcaatgatggtgcatcgtcgatcagttatcctgctgcctacagcagcgtcattgcggtgggatctgtgacgtccaatcgtacacgatcctcgttttctaactatggatctgggcttgaagttatggcaccgggcagcaacatctacagtacgtatcctaattccagatatacatctttgagtggtacaagcatggctactccgcacgttgcgggcgtagctgggctcattcgcgcagccaacccagacatatctgtcgcgcaagcccgtcagattctgcgggataccgcgcaagaagcaggatcgttcacacagtacggctatggaatcgtcgatgctcatgccgccgttgttgctgcatccggtggtagcggcggc

SEQ ID NO: 690 - protein, 413 aa, synthetic construct
  REGION 1..413: note = Variant of serine peptidase from Bacillus sinesaloumensis
MADQASQANGNQDVIEGELIVSVEPKNGKPDVSIQSAQSVTGQEDVLKSKGFTIVDTLHVEDSSVKPLVSKNFNKKVVEKMGLVYLVQYSPDQFKSSNIAKKELRKELMDLGFKVRYISENYKMMAIEGTATLQAVHPNQNWHYNMIKAPEAWAITSGSSSVKVAVLDTGIDHNHPSLANFVNTNLGRSFVGGNTMDVQGHGTHVAGTIASYGSVSGVMQSATLIPVKVLDNSGSGSLLGITQGILYAADIDADVINMSLGGGGYNQSMDEAVQTAVAQGTIVVAATGNDGASSISYPAAYSSVIAVGSVTSNRTRSSFSNYGSGLEVMAPGSNIYSTYPNSRYTSLSGTSMATPHVAGVAGLIRAANPDISVAQARQILRDTAQEAGSFTQYGYGIVDAHAAVVAASGGSGG

SEQ ID NO: 691 - DNA, 1239 bp, synthetic construct
  misc_feature 1..1239: note = Variant of serine peptidase from Bacillus sinesaloumensis
  source 1..1239: mol_type = other DNA
atggcagatcaagctagtcaagctaatggaaaccaggacgtcattgaaggcgagctgatcgtttcagtggaaccgaagaacggtaaacctgatgtgagcattcaaagtgcacaatccgtaacagggcaggaagacgtccttaaatcgaaaggctttacgatcgttgataccttgcatgtagaggatagcagcgtcaagccactcgtctcgaagaatttcaataagaaagtggtggagaagatgggactggtgtatcttgttcaatactctccggaccagtttaaaagttccaacattgcgaagaaagaactcagaaaagaattgatggatctgggctttaaagtccgctatataagcgaaaattacaagatgatggcgatcgaaggtacagccactcttcaggcagtacaccctaaccaaaactggcattataatatgattaaagctccggaagcgtgggctattacgtctggatcctctagcgttaaagtagcagtcctggatacagggatcgaccataatcacccatccttggccaacttcgtgaatactaatcttggccggtcgtttgttggaggaaacaccatggatgttcaaggtcatggcacacatgttgctggcacgattgcatcttatgggagtgtaagcggagtgatgcagagtgcgacactgatcccggtcaaagtgctcgataattctggcagcgggtccctttacggtattacgcaaggcatattgtatgccgccgacatcgatgcggacgtcattaacatgtctctgggtggaggaggctataatcagagcatggatgaggctgttcaaacagcagttgctcagggaaccattgtagtagcagcgactggcaatgatggtgcatcgtcgatcagttatcctgctgcctacagcagcgtcattgcggtgggatctgtgacgtccaatcgtacacgatcctcgttttctaactatggatctgggcttgaagttatggcaccgggcagcaacatctacagtacgtatcctaattccagatatacatctttgagtggtacaagcatggctactccgcacgttgcgggcgtagctgggctcattcgcgcagccaacccagacatatctgtcgcgcaagcccgtcagattctgcgggatacctgtcaagaagcaggatcgttcacacagtacggctatggaatcgtcgatgctcatgccgccgttgttgctgcatccggtggtagcggcggc

SEQ ID NO: 692 - protein, 413 aa, synthetic construct
  REGION 1..413: note = Variant of serine peptidase from Bacillus sinesaloumensis
MADQASQANGNQDVIEGELIVSVEPKNGKPDVSIQSAQSVTGQEDVLKSKGFTIVDTLHVEDSSVKPLVSKNFNKKVVEKMGLVYLVQYSPDQFKSSNIAKKELRKELMDLGFKVRYISENYKMMAIEGTATLQAVHPNQNWHYNMIKAPEAWAITSGSSSVKVAVLDTGIDHNHPSLANFVNTNLGRSFVGGNTMDVQGHGTHVAGTIASYGSVSGVMQSATLIPVKVLDNSGSGSLYGITQGILYAADIDADVINMSLGGGGYNQSMDEAVQTAVAQGTIVVAATGNDGASSISYPAAYSSVIAVGSVTSNRTRSSFSNYGSGLEVMAPGSNIYSTYPNSRYTSLSGTSMATPHVAGVAGLIRAANPDISVAQARQILRDTCQEAGSFTQYGYGIVDAHAAVVAASGGSGG

SEQ ID NO: 693 - DNA, 1239 bp, synthetic construct
  misc_feature 1..1239: note = Variant of serine peptidase from Bacillus sinesaloumensis
  source 1..1239: mol_type = other DNA
atggcagatcaagctagtcaagctaatggaaaccaggacgtcattgaaggcgagctgatcgtttcagtggaaccgaagaacggtaaacctgatgtgagcattcaaagtgcacaatccgtaacagggcaggaagacgtccttaaatcgaaaggctttacgatcgttgataccttgcatgtagaggatagcagcgtcaagccactcgtctcgaagaatttcaataagaaagtggtggagaagatgggactggtgtatcttgttcaatactctccggaccagtttaaaagttccaacattgcgaagaaagaactcagaaaagaattgatggatctgggctttaaagtccgctatataagcgaaaattacaagatgatggcgatcgaaggtacagccactcttcaggcagtacaccctatgcaaaactggcattataatatgattaaagctccggaagcgtgggctattacgtctggatcctctagcgttaaagtagcagtcctggatacagggatcgaccataatcacccatccttggccaacttcgtgaatactaatcttggccggtcgtttgttggaggaaacaccatggatgttcaaggtcatggcacacatgttgctggcacgattgcatcttatgggagtgtaagcggagtgatgcagagtgcgacactgatcccggtcaaagtgctcgataattctggcagcgggtccctttacggtattacgcaaggcatattgtatgccgccgacatcgatgcggacgtcattaacatgtctctgggtggaggaggctataatcagagcatggatgaggctgttcaaacagcagttgctcagggaaccattgtagtagcagcgactggcaatgatggtgcatcgtcgatcagttatcctgctgcctacagcagcgtcattgcggtgggatctgtgacgtccaatcgtacacgatcctcgttttctaactatggatctgggcttgaagttatggcaccgggcagcaacatctacagtacgtatcctaattccagatatacatctttgagtggtacaagcatggctactccgcacgttgcgggcgtagctgggctcattcgcgcagccaacccagacatatctgtcgcgcaagcccgtcagattctgcgggataccgcgcaagaagcaggatcgttcacacagtacggctatggaatcgtcgatgctcatgccgccgttgttgctgcatccggtggtagcggcggc

SEQ ID NO: 694 - protein, 413 aa, synthetic construct
  REGION 1..413: note = Variant of serine peptidase from Bacillus sinesaloumensis
MADQASQANGNQDVIEGELIVSVEPKNGKPDVSIQSAQSVTGQEDVLKSKGFTIVDTLHVEDSSVKPLVSKNFNKKVVEKMGLVYLVQYSPDQFKSSNIAKKELRKELMDLGFKVRYISENYKMMAIEGTATLQAVHPMQNWHYNMIKAPEAWAITSGSSSVKVAVLDTGIDHNHPSLANFVNTNLGRSFVGGNTMDVQGHGTHVAGTIASYGSVSGVMQSATLIPVKVLDNSGSGSLYGITQGILYAADIDADVINMSLGGGGYNQSMDEAVQTAVAQGTIVVAATGNDGASSISYPAAYSSVIAVGSVTSNRTRSSFSNYGSGLEVMAPGSNIYSTYPNSRYTSLSGTSMATPHVAGVAGLIRAANPDISVAQARQILRDTAQEAGSFTQYGYGIVDAHAAVVAASGGSGG

SEQ ID NO: 695 - DNA, 1239 bp, synthetic construct
  misc_feature 1..1239: note = Variant of serine peptidase from Bacillus sinesaloumensis
  source 1..1239: mol_type = other DNA
atggcagatcaagctagtcaagctaatggaaaccaggacgtcattgaaggcgagctgatcgtttcagtggaaccgaagaacggtaaacctgatgtgagcattcaaagtgcacaatccgtaacagggcaggaagacgtccttaaatcgaaaggctttacgatcgttgataccttgcatgtagaggatagcagcgtcaagccactcgtctcgaagaatttcaataagaaagtggtggagaagatgggactggtgtatcttgttcaatactctccggaccagtttaaaagttccaacattgcgaagaaagaactcagaaaagaattgatggatctgggctttaaagtccgctatataagcgaaaattacaagatgatggcgatcgaaggtacagccactcttcaggcagtacaccctaaccaaaactggcattataatatgattaaagctccggaagcgtgggctattacgtctggatcctctagcgttaaagtagcagtcctggatacagggatcgaccataatcacccatccttggccaacttcgtgaatactaatcttggccggtcgtttgttggaggaaacaccatggatgttcaaggtcatggcacacatgttgctggcacgattgcatcttatgggagtgtaagcggagtgatgcagagtgcgacactgatcccggtcaaagtgctcgataattctggcagcgggtccctttacttgattacgcaaggcatattgtatgccgccgacatcgatgcggacgtcattaacatgtctctgggtggaggaggctataatcagagcatggatgaggctgttcaaacagcagttgctcagggaaccattgtagtagcagcgactggcaatgatggtgcatcgtcgatcagttatcctgctgcctacagcagcgtcattgcggtgggatctgtgacgtccaatcgtacacgatcctcgttttctaactatggatctgggcttgaagttatggcaccgggcagcaacatctacagtacgtatcctaattccagatatacatctttgagtggtacaagcatggctactccgcacgttgcgggcgtagctgggctcattcgcgcagccaacccagacatatctgtcgcgcaagcccgtcagattctgcgggataccgcgcaagaagcaggatcgttcacacagtacggctatggaatcgtcgatgctcatgccgccgttgttgctgcatccggtggtagcggcggc

SEQ ID NO: 696 - protein, 413 aa, synthetic construct
  REGION 1..413: note = Variant of serine peptidase from Bacillus sinesaloumensis
MADQASQANGNQDVIEGELIVSVEPKNGKPDVSIQSAQSVTGQEDVLKSKGFTIVDTLHVEDSSVKPLVSKNFNKKVVEKMGLVYLVQYSPDQFKSSNIAKKELRKELMDLGFKVRYISENYKMMAIEGTATLQAVHPNQNWHYNMIKAPEAWAITSGSSSVKVAVLDTGIDHNHPSLANFVNTNLGRSFVGGNTMDVQGHGTHVAGTIASYGSVSGVMQSATLIPVKVLDNSGSGSLYLITQGILYAADIDADVINMSLGGGGYNQSMDEAVQTAVAQGTIVVAATGNDGASSISYPAAYSSVIAVGSVTSNRTRSSFSNYGSGLEVMAPGSNIYSTYPNSRYTSLSGTSMATPHVAGVAGLIRAANPDISVAQARQILRDTAQEAGSFTQYGYGIVDAHAAVVAASGGSGG

SEQ ID NO: 697 - DNA, 1239 bp, synthetic construct
  misc_feature 1..1239: note = Variant of serine peptidase from Bacillus sinesaloumensis
  source 1..1239: mol_type = other DNA
atggcagatcaagctagtcaagctaatggaaaccaggacgtcattgaaggcgagctgatcgtttcagtggaaccgaagaacggtaaacctgatgtgagcattcaaagtgcacaatccgtaacagggcaggaagacgtccttaaatcgaaaggctttacgatcgttgataccttgcatgtagaggatagcagcgtcaagccactcgtctcgaagaatttcaataagaaagtggtggagaagatgggactggtgtatcttgttcaatactctccggaccagtttaaaagttccaacattgcgaagaaagaactcagaaaagaattgatggatctgggctttaaagtccgctatataagcgaaaattacaagatgatggcgatcgaaggtacagccactcttcaggcagtacaccctaaccaaaactggcattataatatgattaaagctccggaagcgtgggctattacgtctggatcctctagcgttaaagtagcagtcctggatacagggatcgaccataatcacccatccttggccaacttcgtgaatactaatcttggccggtcgtttgttggaggaaacaccatggatgttcaaggtcatggcacacatgttgctggcacgattgcatcttatgggagtgtaagcggagtgatgcagagtgcgacactgatcccggtcaaagtgctcgataattctggcagcgggtccctttacggtattacgacgggcatattgtatgccgccgacatcgatgcggacgtcattaacatgtctctgggtggaggaggctataatcagagcatggatgaggctgttcaaacagcagttgctcagggaaccattgtagtagcagcgactggcaatgatggtgcatcgtcgatcagttatcctgctgcctacagcagcgtcattgcggtgggatctgtgacgtccaatcgtacacgatcctcgttttctaactatggatctgggcttgaagttatggcaccgggcagcaacatctacagtacgtatcctaattccagatatacatctttgagtggtacaagcatggctactccgcacgttgcgggcgtagctgggctcattcgcgcagccaacccagacatatctgtcgcgcaagcccgtcagattctgcgggataccgcgcaagaagcaggatcgttcacacagtacggctatggaatcgtcgatgctcatgccgccgttgttgctgcatccggtggtagcggcggc

SEQ ID NO: 698 - protein, 413 aa, synthetic construct
  REGION 1..413: note = Variant of serine peptidase from Bacillus sinesaloumensis
MADQASQANGNQDVIEGELIVSVEPKNGKPDVSIQSAQSVTGQEDVLKSKGFTIVDTLHVEDSSVKPLVSKNFNKKVVEKMGLVYLVQYSPDQFKSSNIAKKELRKELMDLGFKVRYISENYKMMAIEGTATLQAVHPNQNWHYNMIKAPEAWAITSGSSSVKVAVLDTGIDHNHPSLANFVNTNLGRSFVGGNTMDVQGHGTHVAGTIASYGSVSGVMQSATLIPVKVLDNSGSGSLYGITTGILYAADIDADVINMSLGGGGYNQSMDEAVQTAVAQGTIVVAATGNDGASSISYPAAYSSVIAVGSVTSNRTRSSFSNYGSGLEVMAPGSNIYSTYPNSRYTSLSGTSMATPHVAGVAGLIRAANPDISVAQARQILRDTAQEAGSFTQYGYGIVDAHAAVVAASGGSGG

SEQ ID NO: 699 - DNA, 1239 bp, synthetic construct
  misc_feature 1..1239: note = Variant of serine peptidase from Bacillus sinesaloumensis
  source 1..1239: mol_type = other DNA
atggcagatcaagctagtcaagctaatggaaaccaggacgtcattgaaggcgagctgatcgtttcagtggaaccgaagaacggtaaacctgatgtgagcattcaaagtgcacaatccgtaacagggcaggaagacgtccttaaatcgaaaggctttacgatcgttgataccttgcatgtagaggatagcagcgtcaagccactcgtctcgaagaatttcaataagaaagtggtggagaagatgggactggtgtatcttgttcaatactctccggaccagtttaaaagttccaacattgcgaagaaagaactcagaaaagaattgatggatctgggctttaaagtccgctatataagcgaaaattacaagatgatggcgatcgaaggtacagccactcttcaggcagtacaccctaaccaaaactggcattataatatgattaaagctccggaagcgtgggctattacgtctggatcctctagcgttaaagtagcagtcctggatacagggatcgaccataatcacccatccttggccaacttcgtgaatactaatcttggccggtcgtttgttggaggaaacaccatggatgttcaaggtcatggcacacatgttgctggcacgattgcatcttatgggagtgtaagcggagtgatgcagagtgcgacactgatcccggtcaaagtgctcgataattctggcagcgggtccctttacggtattacgcaaggcatattgtatgccgccttgatcgatgcggacgtcattaacatgtctctgggtggaggaggctataatcagagcatggatgaggctgttcaaacagcagttgctcagggaaccattgtagtagcagcgactggcaatgatggtgcatcgtcgatcagttatcctgctgcctacagcagcgtcattgcggtgggatctgtgacgtccaatcgtacacgatcctcgttttctaactatggatctgggcttgaagttatggcaccgggcagcaacatctacagtacgtatcctaattccagatatacatctttgagtggtacaagcatggctactccgcacgttgcgggcgtagctgggctcattcgcgcagccaacccagacatatctgtcgcgcaagcccgtcagattctgcgggataccgcgcaagaagcaggatcgttcacacagtacggctatggaatcgtcgatgctcatgccgccgttgttgctgcatccggtggtagcggcggc

SEQ ID NO: 700 - protein, 413 aa, synthetic construct
  REGION 1..413: note = Variant of serine peptidase from Bacillus sinesaloumensis
MADQASQANGNQDVIEGELIVSVEPKNGKPDVSIQSAQSVTGQEDVLKSKGFTIVDTLHVEDSSVKPLVSKNFNKKVVEKMGLVYLVQYSPDQFKSSNIAKKELRKELMDLGFKVRYISENYKMMAIEGTATLQAVHPNQNWHYNMIKAPEAWAITSGSSSVKVAVLDTGIDHNHPSLANFVNTNLGRSFVGGNTMDVQGHGTHVAGTIASYGSVSGVMQSATLIPVKVLDNSGSGSLYGITQGILYAALIDADVINMSLGGGGYNQSMDEAVQTAVAQGTIVVAATGNDGASSISYPAAYSSVIAVGSVTSNRTRSSFSNYGSGLEVMAPGSNIYSTYPNSRYTSLSGTSMATPHVAGVAGLIRAANPDISVAQARQILRDTAQEAGSFTQYGYGIVDAHAAVVAASGGSGG

SEQ ID NO: 701 - DNA, 1239 bp, synthetic construct
  misc_feature 1..1239: note = Variant of serine peptidase from Bacillus sinesaloumensis
  source 1..1239: mol_type = other DNA
atggcagatcaagctagtcaagctaatggaaaccaggacgtcattgaaggcgagctgatcgtttcagtggaaccgaagaacggtaaacctgatgtgagcattcaaagtgcacaatccgtaacagggcaggaagacgtccttaaatcgaaaggctttacgatcgttgataccttgcatgtagaggatagcagcgtcaagccactcgtctcgaagaatttcaataagaaagtggtggagaagatgggactggtgtatcttgttcaatactctccggaccagtttaaaagttccaacattgcgaagaaagaactcagaaaagaattgatggatctgggctttaaagtccgctatataagcgaaaattacaagatgatggcgatcgaaggtacagccactcttcaggcagtacaccctaaccaaaactggcattataatatgattaaagctccggaagcgtgggctattacgtctggatcctctagcgttaaagtagcagtcctggatacagggatcgaccataatcacccatccttggccaacttcgtgaatactaatcttggccggtcgtttgttggaggaaacaccatggatgttcaaggtcatggcacacatgttgctggcacgattgcatcttatgggagtgtaagcggagtgatgcagagtgcgacactgatcccggtcaaagtgctcgataattctggcagcgggtccctttacggtattacgcaaggcatattgtatgccgccgcgatcgatgcggacgtcattaacatgtctctgggtggaggaggctataatcagagcatggatgaggctgttcaaacagcagttgctcagggaaccattgtagtagcagcgactggcaatgatggtgcatcgtcgatcagttatcctgctgcctacagcagcgtcattgcggtgggatctgtgacgtccaatcgtacacgatcctcgttttctaactatggatctgggcttgaagttatggcaccgggcagcaacatctacagtacgtatcctaattccagatatacatctttgagtggtacaagcatggctactccgcacgttgcgggcgtagctgggctcattcgcgcagccaacccagacatatctgtcgcgcaagcccgtcagattctgcgggataccgcgcaagaagcaggatcgttcacacagtacggctatggaatcgtcgatgctcatgccgccgttgttgctgcatccggtggtagcggcggc

SEQ ID NO: 702 - protein, 413 aa, synthetic construct
  REGION 1..413: note = Variant of serine peptidase from Bacillus sinesaloumensis
MADQASQANGNQDVIEGELIVSVEPKNGKPDVSIQSAQSVTGQEDVLKSKGFTIVDTLHVEDSSVKPLVSKNFNKKVVEKMGLVYLVQYSPDQFKSSNIAKKELRKELMDLGFKVRYISENYKMMAIEGTATLQAVHPNQNWHYNMIKAPEAWAITSGSSSVKVAVLDTGIDHNHPSLANFVNTNLGRSFVGGNTMDVQGHGTHVAGTIASYGSVSGVMQSATLIPVKVLDNSGSGSLYGITQGILYAAAIDADVINMSLGGGGYNQSMDEAVQTAVAQGTIVVAATGNDGASSISYPAAYSSVIAVGSVTSNRTRSSFSNYGSGLEVMAPGSNIYSTYPNSRYTSLSGTSMATPHVAGVAGLIRAANPDISVAQARQILRDTAQEAGSFTQYGYGIVDAHAAVVAASGGSGG

SEQ ID NO: 703 - DNA, 1239 bp, synthetic construct
  misc_feature 1..1239: note = Variant of serine peptidase from Bacillus sinesaloumensis
  source 1..1239: mol_type = other DNA
atggcagatcaagctagtcaagctaatggaaaccaggacgtcattgaaggcgagctgatcgtttcagtggaaccgaagaacggtaaacctgatgtgagcattcaaagtgcacaatccgtaacagggcaggaagacgtccttaaatcgaaaggctttacgatcgttgataccttgcatgtagaggatagcagcgtcaagccactcgtctcgaagaatttcaataagaaagtggtggagaagatgggactggtgtatcttgttcaatactctccggaccagtttaaaagttccaacattgcgaagaaagaactcagaaaagaattgatggatctgggctttaaagtccgctatataagcgaaaattacaagatgatggcgatcgaaggtacagccactcttcaggcagtacaccctaaccaaaactggcattataatatgattaaagctccggaagcgtgggctattacgtctggatcctctagcgttaaagtagcagtcctggatacagggatcgaccataatcacccatccttggccaacttcgtgaatactaatcttggccggtcgtttgttggaggaaacaccatggatgttcaaggtcatggcacacatgttgctggcacgattgcatcttatgggagtgtaagcggagtgatgcagagtgcgacactgatcccggtcaaagtgctcgataattctggcagcgggtccctttacggtattacgcaaggcatattgtatgccgccgacatcgatgcggacgtcattaacatgtctctgggtggaggaggctataatcagagcatggatgaggctgttcaaacagcagttgctcagggaaccattgtagtagcagcgactggcaatgatggtgcatcgtcgatcagttatcctgctgcctacagcagcgtcattgcggtgggatctgtgacgtccaatcgtacacgatcctcgttttctaactatggatctgggcttgaagttatggcaccgggcagcaacatctacagtacgtatcctaattccagatatacatctttgagtggtacaagcatggctactccgcacgttgcgggcgtagctgggctcattcgcgcagccaacccagacatatctgtcgcgcaagcccgtcagattctgcggacgaccgcgcaagaagcaggatcgttcacacagtacggctatggaatcgtcgatgctcatgccgccgttgttgctgcatccggtggtagcggcggc

SEQ ID NO: 704 - protein, 413 aa, synthetic construct
  REGION 1..413: note = Variant of serine peptidase from Bacillus sinesaloumensis
MADQASQANGNQDVIEGELIVSVEPKNGKPDVSIQSAQSVTGQEDVLKSKGFTIVDTLHVEDSSVKPLVSKNFNKKVVEKMGLVYLVQYSPDQFKSSNIAKKELRKELMDLGFKVRYISENYKMMAIEGTATLQAVHPNQNWHYNMIKAPEAWAITSGSSSVKVAVLDTGIDHNHPSLANFVNTNLGRSFVGGNTMDVQGHGTHVAGTIASYGSVSGVMQSATLIPVKVLDNSGSGSLYGITQGILYAADIDADVINMSLGGGGYNQSMDEAVQTAVAQGTIVVAATGNDGASSISYPAAYSSVIAVGSVTSNRTRSSFSNYGSGLEVMAPGSNIYSTYPNSRYTSLSGTSMATPHVAGVAGLIRAANPDISVAQARQILRTTAQEAGSFTQYGYGIVDAHAAVVAASGGSGG

SEQ ID NO: 705 - DNA, 1239 bp, synthetic construct
  misc_feature 1..1239: note = Variant of serine peptidase from Bacillus sinesaloumensis
  source 1..1239: mol_type = other DNA
atggcagatcaagctagtcaagctaatggaaaccaggacgtcattgaaggcgagctgatcgtttcagtggaaccgaagaacggtaaacctgatgtgagcattcaaagtgcacaatccgtaacagggcaggaagacgtccttaaatcgaaaggctttacgatcgttgataccttgcatgtagaggatagcagcgtcaagccactcgtctcgaagaatttcaataagaaagtggtggagaagatgggactggtgtatcttgttcaatactctccggaccagtttaaaagttccaacattgcgaagaaagaactcagaaaagaattgatggatctgggctttaaagtccgctatataagcgaaaattacaagatgatggcgatcgaaggtacagccactcttcaggcagtacaccctaaccaaaactggcattataatatgattaaagctccggaagcgtgggctattacgtctggatcctctagcgttaaagtagcagtcctggatacagggatcgaccataatcacccatccttggccaacttcgtgaatactaatcttggccggtcgtttgttggaggaaacaccatggatgttcaaggtcatggcacacatgttgctggcacgattgcatcttatgggagtgtaagcggagtgatgcagagtgcgacactgatcccggtcaaagtgctcgataattctggcagcgggtccctttacggtattacgcaaggcatattgtatgccgccgacatcgatgcggacgtcattaacatgtctctgggtggaggaggctataatcagagcatggatgaggctgttcaaacagcagttgctcagggaaccattgtagtagcagcgactggcaatgatggtgcatcgtcgatcagttatcctgctgcctacagcagcgtcattgcggtgggatctgtgacgtccaatcgtacacgatcctcgttttctaactatggatctgggcttgaagttatggcaccgggcagcaacatctacagtacgtatcctaattccagatatacatctttgagtggtacaagcatggctactccgcacgttgcgggcgtagctgggctcgctcgcgcagccaacccagacatatctgtcgcgcaagcccgtcagattctgcgggataccgcgcaagaagcaggatcgttcacacagtacggctatggaatcgtcgatgctcatgccgccgttgttgctgcatccggtggtagcggcggc

SEQ ID NO: 706 - protein, 413 aa, synthetic construct
  REGION 1..413: note = Variant of serine peptidase from Bacillus sinesaloumensis
MADQASQANGNQDVIEGELIVSVEPKNGKPDVSIQSAQSVTGQEDVLKSKGFTIVDTLHVEDSSVKPLVSKNFNKKVVEKMGLVYLVQYSPDQFKSSNIAKKELRKELMDLGFKVRYISENYKMMAIEGTATLQAVHPNQNWHYNMIKAPEAWAITSGSSSVKVAVLDTGIDHNHPSLANFVNTNLGRSFVGGNTMDVQGHGTHVAGTIASYGSVSGVMQSATLIPVKVLDNSGSGSLYGITQGILYAADIDADVINMSLGGGGYNQSMDEAVQTAVAQGTIVVAATGNDGASSISYPAAYSSVIAVGSVTSNRTRSSFSNYGSGLEVMAPGSNIYSTYPNSRYTSLSGTSMATPHVAGVAGLARAANPDISVAQARQILRDTAQEAGSFTQYGYGIVDAHAAVVAASGGSGG

SEQ ID NO: 707 - DNA, 1239 bp, synthetic construct
  misc_feature 1..1239: note = Variant of serine peptidase from Bacillus sinesaloumensis
  source 1..1239: mol_type = other DNA
atggcagatcaagctagtcaagctaatggaaaccaggacgtcattgaaggcgagctgatcgtttcagtggaaccgaagaacggtaaacctgatgtgagcattcaaagtgcacaatccgtaacagggcaggaagacgtccttaaatcgaaaggctttacgatcgttgataccttgcatgtagaggatagcagcgtcaagccactcgtctcgaagaatttcaataagaaagtggtggagaagatgggactggtgtatcttgttcaatactctccggaccagtttaaaagttccaacattgcgaagaaagaactcagaaaagaattgatggatctgggctttaaagtccgctatataagcgaaaattacaagatgatggcgatcgaaggtacagccactcttcaggcagtacaccctaaccaaaactggcattataatatgattaaagctccggaagcgtgggctattacgtctggatcctctagcgttaaagtagcagtcctggatacagggatcgaccataatcacccatccttggccaacttcgtgaatactaatcttggccggtcgtttgttggaggaaacaccatggatgttcaaggtcatggcacacatgttgctggcacgattgcatcttatgggagtgtaagcggagtgatgcagagtgcgacactgatcccggtcaaagtgctcgataattctggcagcgggtccctttacggtattacgcaaggcatattgtatgccgccgacatcgatgcggacgtcattaacatgtctctgggtggaggaggctataatcagagcatggatgaggctgttcaaacagcagttgctcagggaaccattgtagtagcagcgactggcaatgatggtgcatcgtcgatcagttatcctgctgcctacagcagcgtcattgcggtgggatctgtgacgtccaatcgtacacgatcctcgttttctaactatggatctgggcttgaagttatggcaccgggcagcaacatctacagtacgtatcctaattccagatatacagtgttgagtggtacaagcatggctactccgcacgttgcgggcgtagctgggctcattcgcgcagccaacccagacatatctgtcgcgcaagcccgtcagattctgcgggataccgcgcaagaagcaggatcgttcacacagtacggctatggaatcgtcgatgctcatgccgccgttgttgctgcatccggtggtagcggcggc

SEQ ID NO: 708 - protein, 413 aa, synthetic construct
  REGION 1..413: note = Variant of serine peptidase from Bacillus sinesaloumensis
MADQASQANGNQDVIEGELIVSVEPKNGKPDVSIQSAQSVTGQEDVLKSKGFTIVDTLHVEDSSVKPLVSKNFNKKVVEKMGLVYLVQYSPDQFKSSNIAKKELRKELMDLGFKVRYISENYKMMAIEGTATLQAVHPNQNWHYNMIKAPEAWAITSGSSSVKVAVLDTGIDHNHPSLANFVNTNLGRSFVGGNTMDVQGHGTHVAGTIASYGSVSGVMQSATLIPVKVLDNSGSGSLYGITQGILYAADIDADVINMSLGGGGYNQSMDEAVQTAVAQGTIVVAATGNDGASSISYPAAYSSVIAVGSVTSNRTRSSFSNYGSGLEVMAPGSNIYSTYPNSRYTVLSGTSMATPHVAGVAGLIRAANPDISVAQARQILRDTAQEAGSFTQYGYGIVDAHAAVVAASGGSGG

SEQ ID NO: 709 - DNA, 1239 bp, synthetic construct
  misc_feature 1..1239: note = Variant of serine peptidase from Bacillus sinesaloumensis
  source 1..1239: mol_type = other DNA
atggcagatcaagctagtcaagctaatggaaaccaggacgtcattgaaggcgagctgatcgtttcagtggaaccgaagaacggtaaacctgatgtgagcattcaaagtgcacaatccgtaacagggcaggaagacgtccttaaatcgaaaggctttacgatcgttgataccttgcatgtagaggatagcagcgtcaagccactcgtctcgaagaatttcaataagaaagtggtggagaagatgggactggtgtatcttgttcaatactctccggaccagtttaaaagttccaacattgcgaagaaagaactcagaaaagaattgatggatctgggctttaaagtccgctatataagcgaaaattacaagatgatggcgatcgaaggtacagccactcttcaggcagtacaccctaaccaaaactggcattataatatgattaaagctccggaagcgtgggctattacgtctggatcctctagcgttaaagtagcagtcctggatacagggatcgaccataatcacccatccttggccaacttcgtgaatactaatcttggccggtcgtttgttggaggaaacaccatggatgttcaaggtcatggcacacatgttgctggcacgattgcatcttatgggagtgtaagcggagtgatgcagagtgcgacactgatcccggtcaaagtgctcgataattctggcagcgggtccctttacggtattacgcaaggcatattgtatgccgccgacatcgatgcggacgtcattaacatgtctctgggtggaggaggctataatcagagcatggatgaggctgttcaaacagcagttgctcagggaaccattgtagtagcagcgactggcaatgatggtgcatcgtcgatcagttatcctgctgcctacagcagcgtcattgcggtgggatctgtgacgtccaatcgtacacgatcctcgttttctaactatggatctgggcttgaagttatggcaccgggcagcaacatctacagtacgtatcctaattccagatatacatctttgagtggtacaagcatggctactccgcacgttgcgggcgtagctgggctcattcgcgcagccaacccagacatatctatggcgcaagcccgtcagattctgcgggataccgcgcaagaagcaggatcgttcacacagtacggctatggaatcgtcgatgctcatgccgccgttgttgctgcatccggtggtagcggcggc

SEQ ID NO: 710 - protein, 413 aa, synthetic construct
  REGION 1..413: note = Variant of serine peptidase from Bacillus sinesaloumensis
MADQASQANGNQDVIEGELIVSVEPKNGKPDVSIQSAQSVTGQEDVLKSKGFTIVDTLHVEDSSVKPLVSKNFNKKVVEKMGLVYLVQYSPDQFKSSNIAKKELRKELMDLGFKVRYISENYKMMAIEGTATLQAVHPNQNWHYNMIKAPEAWAITSGSSSVKVAVLDTGIDHNHPSLANFVNTNLGRSFVGGNTMDVQGHGTHVAGTIASYGSVSGVMQSATLIPVKVLDNSGSGSLYGITQGILYAADIDADVINMSLGGGGYNQSMDEAVQTAVAQGTIVVAATGNDGASSISYPAAYSSVIAVGSVTSNRTRSSFSNYGSGLEVMAPGSNIYSTYPNSRYTSLSGTSMATPHVAGVAGLIRAANPDISMAQARQILRDTAQEAGSFTQYGYGIVDAHAAVVAASGGSGG

SEQ ID NO: 711 - DNA, 1239 bp, synthetic construct
  misc_feature 1..1239: note = Variant of serine peptidase from Bacillus sinesaloumensis
  source 1..1239: mol_type = other DNA
atggcagatcaagctagtcaagctaatggaaaccaggacgtcattgaaggcgagctgatcgtttcagtggaaccgaagaacggtaaacctgatgtgagcattcaaagtgcacaatccgtaacagggcaggaagacgtccttaaatcgaaaggctttacgatcgttgataccttgcatgtagaggatagcagcgtcaagccactcgtctcgaagaatttcaataagaaagtggtggagaagatgggactggtgtatcttgttcaatactctccggaccagtttaaaagttccaacattgcgaagaaagaactcagaaaagaattgatggatctgggctttaaagtccgctatataagcgaaaattacaagatgatggcgatcgaaggtacagccactcttcaggcagtacaccctaaccaaaactggcattataatatgattaaagctccggaagcgtgggctattacgtctggatcctctagcgttaaagtagcagtcctggatacagggatcgaccataatcacccatccttggccaacttcgtgaatactaatcttggccggtcgtttgttggaggaaacaccatggatgttcaaggtcatggcacacatgttgctggcacgattgcatcttatgggagtgtaagcggagtgatgcagagtgcgacactgatcccggtcaaagtgctcgataattctggcagcgggtccctttacggtattacgcaaggcatattgtatgccgccgacatcgatgcggacgtcattaacatgtctctgggtggaggaggctataatcagagcatggatgaggctgttcaaacagcagttgctcagggaaccattgtagtagcagcgactggcaatgatggtgcatcgtcgatcagttatcctgctgcctacagcagcgtcattgcggtgggatctgtgacgtccaatcgtacacgatcctcgttttctaactatggatctgggcttgaagttatggcaccgggcagcaacatctacagtacgtatcctaattccagatatacatctttgagtggtacaagcatggctactccgcacgttgcgggcgtagctgggctcattcgcgcagccaacccagacatatctgtcgcgcaagcccgtcagattctgcgggataccgcgcaagaagcaggaccgttcacacagtacggctatggaatcgtcgatgctcatgccgccgttgttgctgcatccggtggtagcggcggc

SEQ ID NO: 712 - protein, 413 aa, synthetic construct
  REGION 1..413: note = Variant of serine peptidase from Bacillus sinesaloumensis
MADQASQANGNQDVIEGELIVSVEPKNGKPDVSIQSAQSVTGQEDVLKSKGFTIVDTLHVEDSSVKPLVSKNFNKKVVEKMGLVYLVQYSPDQFKSSNIAKKELRKELMDLGFKVRYISENYKMMAIEGTATLQAVHPNQNWHYNMIKAPEAWAITSGSSSVKVAVLDTGIDHNHPSLANFVNTNLGRSFVGGNTMDVQGHGTHVAGTIASYGSVSGVMQSATLIPVKVLDNSGSGSLYGITQGILYAADIDADVINMSLGGGGYNQSMDEAVQTAVAQGTIVVAATGNDGASSISYPAAYSSVIAVGSVTSNRTRSSFSNYGSGLEVMAPGSNIYSTYPNSRYTSLSGTSMATPHVAGVAGLIRAANPDISVAQARQILRDTAQEAGPFTQYGYGIVDAHAAVVAASGGSGG

SEQ ID NO: 713 - DNA, 1239 bp, synthetic construct
  misc_feature 1..1239: note = Variant of serine peptidase from Bacillus sinesaloumensis
  source 1..1239: mol_type = other DNA
atggcagatcaagctagtcaagctaatggaaaccaggacgtcattgaaggcgagctgatcgtttcagtggaaccgaagaacggtaaacctgatgtgagcattcaaagtgcacaatccgtaacagggcaggaagacgtccttaaatcgaaaggctttacgatcgttgataccttgcatgtagaggatagcagcgtcaagccactcgtctcgaagaatttcaataagaaagtggtggagaagatgggactggtgtatcttgttcaatactctccggaccagtttaaaagttccaacattgcgaagaaagaactcagaaaagaattgatggatctgggctttaaagtccgctatataagcgaaaattacaagatgatggcgatcgaaggtacagccactcttcaggcagtacaccctaaccaaaactggcattataatatgattaaagctccggaagcgtgggctattacgtctggatcctctagcgttaaagtagcagtcctggatacagggatcgaccataatcacccatccttggccaacttcgtgaatactaatcttggccggtcgtttgttggaggaaacaccatggatgttcaaggtcatggcacacatgttgctggcacgattgcatcttatgggagtgtaagcggagtgatgcagagtgcgacactgatcccggtcaaagtgctcgataattctggcagcgggtccctttacggtattacgcaaggcatattgtatgccgccgacatcgatgcggacgtcattaacatgtctctgggtggaggaggctataatcagagcatggatgaggctgttcaaacagcagttgctcagggaaccattgtagtagcagcgactggcaatgatggtgcatcgtcgatcagttatcctgctgcctacagcagcgtcattgcggtgggatctgtgacgtccaatcgtacacgatcctcgttttctaactatggatctgggcttgaagttatggcaccgggcagcaacatctacagtacgtatcctaattccagatatacatctttgagtggtacaagcatggctactccgcacgttgcgggcgtagctgggctcattcgcgcagccaacccagacatatcttgtgcgcaagcccgtcagattctgcgggataccgcgcaagaagcaggatcgttcacacagtacggctatggaatcgtcgatgctcatgccgccgttgttgctgcatccggtggtagcggcggc

SEQ ID NO: 714 - protein, 413 aa, synthetic construct
  REGION 1..413: note = Variant of serine peptidase from Bacillus sinesaloumensis
MADQASQANGNQDVIEGELIVSVEPKNGKPDVSIQSAQSVTGQEDVLKSKGFTIVDTLHVEDSSVKPLVSKNFNKKVVEKMGLVYLVQYSPDQFKSSNIAKKELRKELMDLGFKVRYISENYKMMAIEGTATLQAVHPNQNWHYNMIKAPEAWAITSGSSSVKVAVLDTGIDHNHPSLANFVNTNLGRSFVGGNTMDVQGHGTHVAGTIASYGSVSGVMQSATLIPVKVLDNSGSGSLYGITQGILYAADIDADVINMSLGGGGYNQSMDEAVQTAVAQGTIVVAATGNDGASSISYPAAYSSVIAVGSVTSNRTRSSFSNYGSGLEVMAPGSNIYSTYPNSRYTSLSGTSMATPHVAGVAGLIRAANPDISCAQARQILRDTAQEAGSFTQYGYGIVDAHAAVVAASGGSGG

SEQ ID NO: 715 - DNA, 1239 bp, synthetic construct
  misc_feature 1..1239: note = Variant of serine peptidase from Bacillus sinesaloumensis
  source 1..1239: mol_type = other DNA
atggcagatcaagctagtcaagctaatggaaaccaggacgtcattgaaggcgagctgatcgtttcagtggaaccgaagaacggtaaacctgatgtgagcattcaaagtgcacaatccgtaacagggcaggaagacgtccttaaatcgaaaggctttacgatcgttgataccttgcatgtagaggatagcagcgtcaagccactcgtctcgaagaatttcaataagaaagtggtggagaagatgggactggtgtatcttgttcaatactctccggaccagtttaaaagttccaacattgcgaagaaagaactcagaaaagaattgatggatctgggctttaaagtccgctatataagcgaaaattacaagatgatggcgatcgaaggtacagccactcttcaggcagtacaccctaaccaaaactggcattataatatgattaaagctccggaagcgtgggctattacgtctggatcctctagcgttaaagtagcagtcctggatacagggatcgaccataatcacccatccttggccaacttcgtgaatactaatcttggccggtcgtttgttggaggaaacaccatggatgttcaaggtcatggcacacatgttgctggcacgattgcatcttatgggagtgtaagcggagtgatgcagagtgcgacactgatcccggtcaaagtgctcgataattctggcagcgggtccctttacggtattacgcaaggcatattgtatgccgccgacatcgatgcggacgtcattaacatgtctctgggtggaggaggctataatcagagcatggatgaggctgttcaaacagcagttgctcagggaaccattgtagtagcagcgactggcaatgatggtgcatcgtcgatcagttatcctgctgcctacagcagcgtcattgcggtgggatctgtgacgtccaatcgtacacgatcctcgttttctaactatggatctgggcttgaagttatggcaccgggcagcaacatctacagtacgtatcctaattccagatatacatctttgagtggtacaagcatggctactccgcacgttgcgggcgtagctgggctcattcgcgcagccaacccagacatatctgtcgcgcaagcccgtcagattctgcggaggaccgcgcaagaagcaggatcgttcacacagtacggctatggaatcgtcgatgctcatgccgccgttgttgctgcatccggtggtagcggcggc

SEQ ID NO: 716 - protein, 413 aa, synthetic construct
  REGION 1..413: note = Variant of serine peptidase from Bacillus sinesaloumensis
MADQASQANGNQDVIEGELIVSVEPKNGKPDVSIQSAQSVTGQEDVLKSKGFTIVDTLHVEDSSVKPLVSKNFNKKVVEKMGLVYLVQYSPDQFKSSNIAKKELRKELMDLGFKVRYISENYKMMAIEGTATLQAVHPNQNWHYNMIKAPEAWAITSGSSSVKVAVLDTGIDHNHPSLANFVNTNLGRSFVGGNTMDVQGHGTHVAGTIASYGSVSGVMQSATLIPVKVLDNSGSGSLYGITQGILYAADIDADVINMSLGGGGYNQSMDEAVQTAVAQGTIVVAATGNDGASSISYPAAYSSVIAVGSVTSNRTRSSFSNYGSGLEVMAPGSNIYSTYPNSRYTSLSGTSMATPHVAGVAGLIRAANPDISVAQARQILRRTAQEAGSFTQYGYGIVDAHAAVVAASGGSGG

SEQ ID NO: 717 - DNA, 1239 bp, synthetic construct
  misc_feature 1..1239: note = Variant of serine peptidase from Bacillus sinesaloumensis
  source 1..1239: mol_type = other DNA
atggcagatcaagctagtcaagctaatggaaaccaggacgtcattgaaggcgagctgatcgtttcagtggaaccgaagaacggtaaacctgatgtgagcattcaaagtgcacaatccgtaacagggcaggaagacgtccttaaatcgaaaggctttacgatcgttgataccttgcatgtagaggatagcagcgtcaagccactcgtctcgaagaatttcaataagaaagtggtggagaagatgggactggtgtatcttgttcaatactctccggaccagtttaaaagttccaacattgcgaagaaagaactcagaaaagaattgatggatctgggctttaaagtccgctatataagcgaaaattacaagatgatggcgatcgaaggtacagccactcttcaggcagtacaccctaaccaaaactggcattataatatgattaaagctccggaagcgtgggctattacgtctggatcctctagcgttaaagtagcagtcctggatacagggatcgaccataatcacccatccttggccaacttcgtgaatactaatcttggccggtcgtttgttggaggaaacaccatggatgttcaaggtcatggcacacatgttgctggcacgattgcatcttatgggagtgtaagcggagtgatgcagagtgcgacactgatcccggtcaaagtgctcgataattctggcagcgggtccctttacggtattacgcaaggcatattgtatgccgccgacatcgatgcggacgtcattaacatgtctctgggtggaggaggctataatcagagcatggatgaggctgttcaaacagcagttgctcagggaaccattgtagtagcagcgactggcaatgatggtgcatcgtcgatcagttatcctgctgcctacagcagcgtcattgcggtgggatctgtgacgtccaatcgtacacgatcctcgttttctaactatggatctgggcttgaagttatggcaccgggcagcaacatctacagtacgtatcctaattccagatatacatctttgagtggtacaagcatggctactccgcacgttgcgggcgtagctgggctcattcgcgcagccaacccagacatatctgaggcgcaagcccgtcagattctgcgggataccgcgcaagaagcaggatcgttcacacagtacggctatggaatcgtcgatgctcatgccgccgttgttgctgcatccggtggtagcggcggc

SEQ ID NO: 718 - protein, 413 aa, synthetic construct
  REGION 1..413: note = Variant of serine peptidase from Bacillus sinesaloumensis
MADQASQANGNQDVIEGELIVSVEPKNGKPDVSIQSAQSVTGQEDVLKSKGFTIVDTLHVEDSSVKPLVSKNFNKKVVEKMGLVYLVQYSPDQFKSSNIAKKELRKELMDLGFKVRYISENYKMMAIEGTATLQAVHPNQNWHYNMIKAPEAWAITSGSSSVKVAVLDTGIDHNHPSLANFVNTNLGRSFVGGNTMDVQGHGTHVAGTIASYGSVSGVMQSATLIPVKVLDNSGSGSLYGITQGILYAADIDADVINMSLGGGGYNQSMDEAVQTAVAQGTIVVAATGNDGASSISYPAAYSSVIAVGSVTSNRTRSSFSNYGSGLEVMAPGSNIYSTYPNSRYTSLSGTSMATPHVAGVAGLIRAANPDISEAQARQILRDTAQEAGSFTQYGYGIVDAHAAVVAASGGSGG

SEQ ID NO: 719 - DNA, 1239 bp, synthetic construct
  misc_feature 1..1239: note = Variant of serine peptidase from Bacillus sinesaloumensis
  source 1..1239: mol_type = other DNA
atggcagatcaagctagtcaagctaatggaaaccaggacgtcattgaaggcgagctgatcgtttcagtggaaccgaagaacggtaaacctgatgtgagcattcaaagtgcacaatccgtaacagggcaggaagacgtccttaaatcgaaaggctttacgatcgttgataccttgcatgtagaggatagcagcgtcaagccactcgtctcgaagaatttcaataagaaagtggtggagaagatgggactggtgtatcttgttcaatactctccggaccagtttaaaagttccaacattgcgaagaaagaactcagaaaagaattgatggatctgggctttaaagtccgctatataagcgaaaattacaagatgatggcgatcgaaggtacagccactcttcaggcagtacaccctaaccaaaactggcattataatatgattaaagctccggaagcgtgggctattacgtctggatcctctagcgttaaagtagcagtcctggatacagggatcgaccataatcacccatccttggccaacttcgtgaatactaatcttggccggtcgtttgttggaggaaacaccatggatgttcaaggtcatggcacacatgttgctggcacgattgcatcttatgggagtgtaagcggagtgatgcagagtgcgacactgatcccggtcaaagtgctcgataattctggcagcgggtccctttacggtattacgcaaggcatattgtatgccgccgacatcgatgcggaggtcattaacatgtctctgggtggaggaggctataatcagagcatggatgaggctgttcaaacagcagttgctcagggaaccattgtagtagcagcgactggcaatgatggtgcatcgtcgatcagttatcctgctgcctacagcagcgtcattgcggtgggatctgtgacgtccaatcgtacacgatcctcgttttctaactatggatctgggcttgaagttatggcaccgggcagcaacatctacagtacgtatcctaattccagatatacatctttgagtggtacaagcatggctactccgcacgttgcgggcgtagctgggctcattcgcgcagccaacccagacatatctgtcgcgcaagcccgtcagattctgcgggataccgcgcaagaagcaggatcgttcacacagtacggctatggaatcgtcgatgctcatgccgccgttgttgctgcatccggtggtagcggcggc

SEQ ID NO: 720 - protein, 413 aa, synthetic construct
  REGION 1..413: note = Variant of serine peptidase from Bacillus sinesaloumensis
MADQASQANGNQDVIEGELIVSVEPKNGKPDVSIQSAQSVTGQEDVLKSKGFTIVDTLHVEDSSVKPLVSKNFNKKVVEKMGLVYLVQYSPDQFKSSNIAKKELRKELMDLGFKVRYISENYKMMAIEGTATLQAVHPNQNWHYNMIKAPEAWAITSGSSSVKVAVLDTGIDHNHPSLANFVNTNLGRSFVGGNTMDVQGHGTHVAGTIASYGSVSGVMQSATLIPVKVLDNSGSGSLYGITQGILYAADIDAEVINMSLGGGGYNQSMDEAVQTAVAQGTIVVAATGNDGASSISYPAAYSSVIAVGSVTSNRTRSSFSNYGSGLEVMAPGSNIYSTYPNSRYTSLSGTSMATPHVAGVAGLIRAANPDISVAQARQILRDTAQEAGSFTQYGYGIVDAHAAVVAASGGSGG

SEQ ID NO: 721 - DNA, 1239 bp, synthetic construct
  misc_feature 1..1239: note = Variant of serine peptidase from Bacillus sinesaloumensis
  source 1..1239: mol_type = other DNA
atggcagatcaagctagtcaagctaatggaaaccaggacgtcattgaaggcgagctgatcgtttcagtggaaccgaagaacggtaaacctgatgtgagcattcaaagtgcacaatccgtaacagggcaggaagacgtccttaaatcgaaaggctttacgatcgttgataccttgcatgtagaggatagcagcgtcaagccactcgtctcgaagaatttcaataagaaagtggtggagaagatgggactggtgtatcttgttcaatactctccggaccagtttaaaagttccaacattgcgaagaaagaactcagaaaagaattgatggatctgggctttaaagtccgctatataagcgaaaattacaagatgatggcgatcgaaggtacagccactcttcaggcagtacaccctaaccaaaactggcattataatatgattaaagctccggaagcgtgggctattacgtctggatcctctagcgttaaagtagcagtcctggatacagggatcgaccataatcacccatccttggccaacttcgtgaatactaatcttggccggtcgtttgttggaggaaacaccatggatgttcaaggtcatggcacacatgttgctggcacgattgcatcttatgggagtgtaagcggagtgatgcagagtgcgacactgatcccggtcaaagtgctcgataattctggcagcgggtccctttacggtattacgcaaggcataatttatgccgccgacatcgatgcggacgtcattaacatgtctctgggtggaggaggctataatcagagcatggatgaggctgttcaaacagcagttgctcagggaaccattgtagtagcagcgactggcaatgatggtgcatcgtcgatcagttatcctgctgcctacagcagcgtcattgcggtgggatctgtgacgtccaatcgtacacgatcctcgttttctaactatggatctgggcttgaagttatggcaccgggcagcaacatctacagtacgtatcctaattccagatatacatctttgagtggtacaagcatggctactccgcacgttgcgggcgtagctgggctcattcgcgcagccaacccagacatatctgtcgcgcaagcccgtcagattctgcgggataccgcgcaagaagcaggatcgttcacacagtacggctatggaatcgtcgatgctcatgccgccgttgttgctgcatccggtggtagcggcggc

SEQ ID NO: 722 - protein, 413 aa, synthetic construct
  REGION 1..413: note = Variant of serine peptidase from Bacillus sinesaloumensis
MADQASQANGNQDVIEGELIVSVEPKNGKPDVSIQSAQSVTGQEDVLKSKGFTIVDTLHVEDSSVKPLVSKNFNKKVVEKMGLVYLVQYSPDQFKSSNIAKKELRKELMDLGFKVRYISENYKMMAIEGTATLQAVHPNQNWHYNMIKAPEAWAITSGSSSVKVAVLDTGIDHNHPSLANFVNTNLGRSFVGGNTMDVQGHGTHVAGTIASYGSVSGVMQSATLIPVKVLDNSGSGSLYGITQGIIYAADIDADVINMSLGGGGYNQSMDEAVQTAVAQGTIVVAATGNDGASSISYPAAYSSVIAVGSVTSNRTRSSFSNYGSGLEVMAPGSNIYSTYPNSRYTSLSGTSMATPHVAGVAGLIRAANPDISVAQARQILRDTAQEAGSFTQYGYGIVDAHAAVVAASGGSGG

SEQ ID NO: 723 - DNA, 1239 bp, synthetic construct
  misc_feature 1..1239: note = Variant of serine peptidase from Bacillus sinesaloumensis
  source 1..1239: mol_type = other DNA
atggcagatcaagctagtcaagctaatggaaaccaggacgtcattgaaggcgagctgatcgtttcagtggaaccgaagaacggtaaacctgatgtgagcattcaaagtgcacaatccgtaacagggcaggaagacgtccttaaatcgaaaggctttacgatcgttgataccttgcatgtagaggatagcagcgtcaagccactcgtctcgaagaatttcaataagaaagtggtggagaagatgggactggtgtatcttgttcaatactctccggaccagtttaaaagttccaacattgcgaagaaagaactcagaaaagaattgatggatctgggctttaaagtccgctatataagcgaaaattacaagatgatggcgatcgaaggtacagccactcttcaggcagtacaccctaaccaaaactggcattataatatgattaaagctccggaagcgtgggctattacgtctggatcctctagcgttaaagtagcagtcctggatacagggatcgaccataatcacccatccttggccaacttcgtgaatactaatcttggccggtcgtttgttggaggaaacaccatggatgttcaaggtcatggcacacatgttgctggcacgattgcatcttatgggagtgtaagcggagtgatgcagagtgcgacactgatcccggtcaaagtgctcgataattctggcagcgggtccctttacggtattacgcaaggcatattgtatgccgcctttatcgatgcggacgtcattaacatgtctctgggtggaggaggctataatcagagcatggatgaggctgttcaaacagcagttgctcagggaaccattgtagtagcagcgactggcaatgatggtgcatcgtcgatcagttatcctgctgcctacagcagcgtcattgcggtgggatctgtgacgtccaatcgtacacgatcctcgttttctaactatggatctgggcttgaagttatggcaccgggcagcaacatctacagtacgtatcctaattccagatatacatctttgagtggtacaagcatggctactccgcacgttgcgggcgtagctgggctcattcgcgcagccaacccagacatatctgtcgcgcaagcccgtcagattctgcgggataccgcgcaagaagcaggatcgttcacacagtacggctatggaatcgtcgatgctcatgccgccgttgttgctgcatccggtggtagcggcggc

SEQ ID NO: 724 - protein, 413 aa, synthetic construct
  REGION 1..413: note = Variant of serine peptidase from Bacillus sinesaloumensis
MADQASQANGNQDVIEGELIVSVEPKNGKPDVSIQSAQSVTGQEDVLKSKGFTIVDTLHVEDSSVKPLVSKNFNKKVVEKMGLVYLVQYSPDQFKSSNIAKKELRKELMDLGFKVRYISENYKMMAIEGTATLQAVHPNQNWHYNMIKAPEAWAITSGSSSVKVAVLDTGIDHNHPSLANFVNTNLGRSFVGGNTMDVQGHGTHVAGTIASYGSVSGVMQSATLIPVKVLDNSGSGSLYGITQGILYAAFIDADVINMSLGGGGYNQSMDEAVQTAVAQGTIVVAATGNDGASSISYPAAYSSVIAVGSVTSNRTRSSFSNYGSGLEVMAPGSNIYSTYPNSRYTSLSGTSMATPHVAGVAGLIRAANPDISVAQARQILRDTAQEAGSFTQYGYGIVDAHAAVVAASGGSGG

SEQ ID NO: 725 - DNA, 1239 bp, synthetic construct
  misc_feature 1..1239: note = Variant of serine peptidase from Bacillus sinesaloumensis
  source 1..1239: mol_type = other DNA
atggcagatcaagctagtcaagctaatggaaaccaggacgtcattgaaggcgagctgatcgtttcagtggaaccgaagaacggtaaacctgatgtgagcattcaaagtgcacaatccgtaacagggcaggaagacgtccttaaatcgaaaggctttacgatcgttgataccttgcatgtagaggatagcagcgtcaagccactcgtctcgaagaatttcaataagaaagtggtggagaagatgggactggtgtatcttgttcaatactctccggaccagtttaaaagttccaacattgcgaagaaagaactcagaaaagaattgatggatctgggctttaaagtccgctatataagcgaaaattacaagatgatggcgatcgaaggtacagccactcttcaggcagtacaccctaaccaaaactggcattataatatgattaaagctccggaagcgtgggctattacgtctggatcctctagcgttaaagtagcagtcctggatacagggatcgaccataatcacccatccttggccaacttcgtgaatactaatcttggccggtcgtttgttggaggaaacaccatggatgttcaaggtcatggcacacatgttgctggcacgattgcatcttatgggagtgtaagcggagtgatgcagagtgcgacactgatcccggtcaaagtgctcgataattctggcagcgggtccctttacggtattacgcaaggcatattgtatgccgccgacatcgatgcggacgtcattaacatgtctctgggtggaggaggctataatcagagcatggatgaggctgttcaaacagcagttgctcagactaccattgtagtagcagcgactggcaatgatggtgcatcgtcgatcagttatcctgctgcctacagcagcgtcattgcggtgggatctgtgacgtccaatcgtacacgatcctcgttttctaactatggatctgggcttgaagttatggcaccgggcagcaacatctacagtacgtatcctaattccagatatacatctttgagtggtacaagcatggctactccgcacgttgcgggcgtagctgggctcattcgcgcagccaacccagacatatctgtcgcgcaagcccgtcagattctgcgggataccgcgcaagaagcaggatcgttcacacagtacggctatggaatcgtcgatgctcatgccgccgttgttgctgcatccggtggtagcggcggc

SEQ ID NO: 726 - protein, 413 aa, synthetic construct
  REGION 1..413: note = Variant of serine peptidase from Bacillus sinesaloumensis
MADQASQANGNQDVIEGELIVSVEPKNGKPDVSIQSAQSVTGQEDVLKSKGFTIVDTLHVEDSSVKPLVSKNFNKKVVEKMGLVYLVQYSPDQFKSSNIAKKELRKELMDLGFKVRYISENYKMMAIEGTATLQAVHPNQNWHYNMIKAPEAWAITSGSSSVKVAVLDTGIDHNHPSLANFVNTNLGRSFVGGNTMDVQGHGTHVAGTIASYGSVSGVMQSATLIPVKVLDNSGSGSLYGITQGILYAADIDADVINMSLGGGGYNQSMDEAVQTAVAQTTIVVAATGNDGASSISYPAAYSSVIAVGSVTSNRTRSSFSNYGSGLEVMAPGSNIYSTYPNSRYTSLSGTSMATPHVAGVAGLIRAANPDISVAQARQILRDTAQEAGSFTQYGYGIVDAHAAVVAASGGSGG

SEQ ID NO: 727 - DNA, 1239 bp, synthetic construct
  misc_feature 1..1239: note = Variant of serine peptidase from Bacillus sinesaloumensis
  source 1..1239: mol_type = other DNA
atggcagatcaagctagtcaagctaatggaaaccaggacgtcattgaaggcgagctgatcgtttcagtggaaccgaagaacggtaaacctgatgtgagcattcaaagtgcacaatccgtaacagggcaggaagacgtccttaaatcgaaaggctttacgatcgttgataccttgcatgtagaggatagcagcgtcaagccactcgtctcgaagaatttcaataagaaagtggtggagaagatgggactggtgtatcttgttcaatactctccggaccagtttaaaagttccaacattgcgaagaaagaactcagaaaagaattgatggatctgggctttaaagtccgctatataagcgaaaattacaagatgatggcgatcgaaggtacagccactcttcaggcagtacaccctaaccaaaactggcattataatatgattaaagctccggaagcgtgggctattacgtctggatcctctagcgttaaagtagcagtcctggatacagggatcgaccataatcacccatccttggccaacttcgtgaatactaatcttggccggtcgtttgttggaggaaacaccatggatgttcaaggtcatggcacacatgttgctggcacgattgcatcttatgggagtgtaagcggagtgatgcagagtgcgacactgatcccggtcaaagtgctcgataattctggcagcgggtccctttacggtattacgcaaggcatattgtatgccgccgacatcgatgcggacgtcattaacatgtctctgggtggaggaggctataatcagagcatggatgaggctgttcaaacagcagttgctcagggaaccattgtagtagcagcgactggcaatgatggtgcatcgtcgatcagttatcctgctgcctacagcagcgtcattgcggtgggatctgtgacgtccaatcgtacacgatcctcgttttctaactatggatctgggcttgaagttatggcaccgggcagcaacatctacagtacgtatcctaattccagatatacatctttgagtggtacaagcatggctactccgcacgttgcgggcgtagctgggctcattcgcgcagccaacccagacatatctgctgcgcaagcccgtcagattctgcgggataccgcgcaagaagcaggatcgttcacacagtacggctatggaatcgtcgatgctcatgccgccgttgttgctgcatccggtggtagcggcggc

SEQ ID NO: 728 - protein, 413 aa, synthetic construct
  REGION 1..413: note = Variant of serine peptidase from Bacillus sinesaloumensis
MADQASQANGNQDVIEGELIVSVEPKNGKPDVSIQSAQSVTGQEDVLKSKGFTIVDTLHVEDSSVKPLVSKNFNKKVVEKMGLVYLVQYSPDQFKSSNIAKKELRKELMDLGFKVRYISENYKMMAIEGTATLQAVHPNQNWHYNMIKAPEAWAITSGSSSVKVAVLDTGIDHNHPSLANFVNTNLGRSFVGGNTMDVQGHGTHVAGTIASYGSVSGVMQSATLIPVKVLDNSGSGSLYGITQGILYAADIDADVINMSLGGGGYNQSMDEAVQTAVAQGTIVVAATGNDGASSISYPAAYSSVIAVGSVTSNRTRSSFSNYGSGLEVMAPGSNIYSTYPNSRYTSLSGTSMATPHVAGVAGLIRAANPDISAAQARQILRDTAQEAGSFTQYGYGIVDAHAAVVAASGGSGG

SEQ ID NO: 729 - DNA, 1239 bp, synthetic construct
  misc_feature 1..1239: note = Variant of serine peptidase from Bacillus sinesaloumensis
  source 1..1239: mol_type = other DNA
atggcagatcaagctagtcaagctaatggaaaccaggacgtcattgaaggcgagctgatcgtttcagtggaaccgaagaacggtaaacctgatgtgagcattcaaagtgcacaatccgtaacagggcaggaagacgtccttaaatcgaaaggctttacgatcgttgataccttgcatgtagaggatagcagcgtcaagccactcgtctcgaagaatttcaataagaaagtggtggagaagatgggactggtgtatcttgttcaatactctccggaccagtttaaaagttccaacattgcgaagaaagaactcagaaaagaattgatggatctgggctttaaagtccgctatataagcgaaaattacaagatgatggcgatcgaaggtacagccactcttcaggcagtacaccctaagcaaaactggcattataatatgattaaagctccggaagcgtgggctattacgtctggatcctctagcgttaaagtagcagtcctggatacagggatcgaccataatcacccatccttggccaacttcgtgaatactaatcttggccggtcgtttgttggaggaaacaccatggatgttcaaggtcatggcacacatgttgctggcacgattgcatcttatgggagtgtaagcggagtgatgcagagtgcgacactgatcccggtcaaagtgctcgataattctggcagcgggtccctttacggtattacgcaaggcatattgtatgccgccgacatcgatgcggacgtcattaacatgtctctgggtggaggaggctataatcagagcatggatgaggctgttcaaacagcagttgctcagggaaccattgtagtagcagcgactggcaatgatggtgcatcgtcgatcagttatcctgctgcctacagcagcgtcattgcggtgggatctgtgacgtccaatcgtacacgatcctcgttttctaactatggatctgggcttgaagttatggcaccgggcagcaacatctacagtacgtatcctaattccagatatacatctttgagtggtacaagcatggctactccgcacgttgcgggcgtagctgggctcattcgcgcagccaacccagacatatctgtcgcgcaagcccgtcagattctgcgggataccgcgcaagaagcaggatcgttcacacagtacggctatggaatcgtcgatgctcatgccgccgttgttgctgcatccggtggtagcggcggc

SEQ ID NO: 730 - protein, 413 aa, synthetic construct
  REGION 1..413: note = Variant of serine peptidase from Bacillus sinesaloumensis
MADQASQANGNQDVIEGELIVSVEPKNGKPDVSIQSAQSVTGQEDVLKSKGFTIVDTLHVEDSSVKPLVSKNFNKKVVEKMGLVYLVQYSPDQFKSSNIAKKELRKELMDLGFKVRYISENYKMMAIEGTATLQAVHPKQNWHYNMIKAPEAWAITSGSSSVKVAVLDTGIDHNHPSLANFVNTNLGRSFVGGNTMDVQGHGTHVAGTIASYGSVSGVMQSATLIPVKVLDNSGSGSLYGITQGILYAADIDADVINMSLGGGGYNQSMDEAVQTAVAQGTIVVAATGNDGASSISYPAAYSSVIAVGSVTSNRTRSSFSNYGSGLEVMAPGSNIYSTYPNSRYTSLSGTSMATPHVAGVAGLIRAANPDISVAQARQILRDTAQEAGSFTQYGYGIVDAHAAVVAASGGSGG

SEQ ID NO: 731 - DNA, 1239 bp, synthetic construct
  misc_feature 1..1239: note = Variant of serine peptidase from Bacillus sinesaloumensis
  source 1..1239: mol_type = other DNA
atggcagatcaagctagtcaagctaatggaaaccaggacgtcattgaaggcgagctgatcgtttcagtggaaccgaagaacggtaaacctgatgtgagcattcaaagtgcacaatccgtaacagggcaggaagacgtccttaaatcgaaaggctttacgatcgttgataccttgcatgtagaggatagcagcgtcaagccactcgtctcgaagaatttcaataagaaagtggtggagaagatgggactggtgtatcttgttcaatactctccggaccagtttaaaagttccaacattgcgaagaaagaactcagaaaagaattgatggatctgggctttaaagtccgctatataagcgaaaattacaagatgatggcgatcgaaggtacagccactcttcaggcagtacaccctaaccaaaactggcattataatatgattaaagctccggaagcgtgggctattacgtctggatcctctagcgttaaagtagcagtcctggatacagggatcgaccataatcacccatccttggccaacttcgtgaatactaatcttggccggtcgtttgttggaggaaacaccatggatgttcaaggtcatggcacacatgttgctggcacgattgcatcttatgggagtgtaagcggagtgatgcagagtgcgacactgatcccggtcaaagtgctcgataattctggcagcgggtccctttacggtattacgcaaggcatattgtatgccgccgacatcgatgcggacgtcattaacatgtctctgggtggaggaggctataatcagagcatggatgaggctgttcaaacagcagttgctcagggaaccattgtagtagcagcgactggcaatgatggtgcatcgtcgatcagttatcctgctgcctacagcagcgtcattgcggtgggatctgtgacgtccaatcgtacacgatcctcgttttctaactatggatctgggcttgaagttatggcaccgggcagcaacatctacagtacgtatcctaattccagatatatttctttgagtggtacaagcatggctactccgcacgttgcgggcgtagctgggctcattcgcgcagccaacccagacatatctgtcgcgcaagcccgtcagattctgcgggataccgcgcaagaagcaggatcgttcacacagtacggctatggaatcgtcgatgctcatgccgccgttgttgctgcatccggtggtagcggcggc

SEQ ID NO: 732 - protein, 413 aa, synthetic construct
  REGION 1..413: note = Variant of serine peptidase from Bacillus sinesaloumensis
MADQASQANGNQDVIEGELIVSVEPKNGKPDVSIQSAQSVTGQEDVLKSKGFTIVDTLHVEDSSVKPLVSKNFNKKVVEKMGLVYLVQYSPDQFKSSNIAKKELRKELMDLGFKVRYISENYKMMAIEGTATLQAVHPNQNWHYNMIKAPEAWAITSGSSSVKVAVLDTGIDHNHPSLANFVNTNLGRSFVGGNTMDVQGHGTHVAGTIASYGSVSGVMQSATLIPVKVLDNSGSGSLYGITQGILYAADIDADVINMSLGGGGYNQSMDEAVQTAVAQGTIVVAATGNDGASSISYPAAYSSVIAVGSVTSNRTRSSFSNYGSGLEVMAPGSNIYSTYPNSRYISLSGTSMATPHVAGVAGLIRAANPDISVAQARQILRDTAQEAGSFTQYGYGIVDAHAAVVAASGGSGG

SEQ ID NO: 733 - DNA, 1239 bp, synthetic construct
  misc_feature 1..1239: note = Variant of serine peptidase from Bacillus sinesaloumensis
  source 1..1239: mol_type = other DNA
atggcagatcaagctagtcaagctaatggaaaccaggacgtcattgaaggcgagctgatcgtttcagtggaaccgaagaacggtaaacctgatgtgagcattcaaagtgcacaatccgtaacagggcaggaagacgtccttaaatcgaaaggctttacgatcgttgataccttgcatgtagaggatagcagcgtcaagccactcgtctcgaagaatttcaataagaaagtggtggagaagatgggactggtgtatcttgttcaatactctccggaccagtttaaaagttccaacattgcgaagaaagaactcagaaaagaattgatggatctgggctttaaagtccgctatataagcgaaaattacaagatgatggcgatcgaaggtacagccactcttcaggcagtacaccctaaccaaaactggcattataatatgattaaagctccggaagcgtgggctattacgtctggatcctctagcgttaaagtagcagtcctggatacagggatcgaccataatcacccatccttggccaacttcgtgaatactaatcttggccggtcgtttgttggaggaaacaccatggatgttcaaggtcatggcacacatgttgctggcacgattgcatcttatgggagtgtaagcggagtgatgcagagtgcgacactgatcccggtcaaagtgctcgataattctggcagcgggtccctttacggtattacgcaaggcatattgtatgccgccgacatcgatgcggacgtcattaacatgtctctgggtggaggaggctataatcagagcatggatgaggctgttcaaacagcagttgctcagggaaccattgtagtagcagcgactggcaatgatggtgcatcgtcgatcagttatcctgctgcctacagcagcgtcattgcggtgggatctgtgacgtccaatcgtacacgatcctcgttttctaactatggatctgggcttgaagttatggcaccgggcagcaacatctacagtacgtatcctaattccagatatacatctttgagtggtacaagcatggctactccgcacgttgcgggcagtgctgggctcattcgcgcagccaacccagacatatctgtcgcgcaagcccgtcagattctgcgggataccgcgcaagaagcaggatcgttcacacagtacggctatggaatcgtcgatgctcatgccgccgttgttgctgcatccggtggtagcggcggc

SEQ ID NO: 734 - protein, 413 aa, synthetic construct
  REGION 1..413: note = Variant of serine peptidase from Bacillus sinesaloumensis
MADQASQANGNQDVIEGELIVSVEPKNGKPDVSIQSAQSVTGQEDVLKSKGFTIVDTLHVEDSSVKPLVSKNFNKKVVEKMGLVYLVQYSPDQFKSSNIAKKELRKELMDLGFKVRYISENYKMMAIEGTATLQAVHPNQNWHYNMIKAPEAWAITSGSSSVKVAVLDTGIDHNHPSLANFVNTNLGRSFVGGNTMDVQGHGTHVAGTIASYGSVSGVMQSATLIPVKVLDNSGSGSLYGITQGILYAADIDADVINMSLGGGGYNQSMDEAVQTAVAQGTIVVAATGNDGASSISYPAAYSSVIAVGSVTSNRTRSSFSNYGSGLEVMAPGSNIYSTYPNSRYTSLSGTSMATPHVAGSAGLIRAANPDISVAQARQILRDTAQEAGSFTQYGYGIVDAHAAVVAASGGSGG

SEQ ID NO: 735 - DNA, 1239 bp, synthetic construct
  misc_feature 1..1239: note = Variant of serine peptidase from Bacillus sinesaloumensis
  source 1..1239: mol_type = other DNA
atggcagatcaagctagtcaagctaatggaaaccaggacgtcattgaaggcgagctgatcgtttcagtggaaccgaagaacggtaaacctgatgtgagcattcaaagtgcacaatccgtaacagggcaggaagacgtccttaaatcgaaaggctttacgatcgttgataccttgcatgtagaggatagcagcgtcaagccactcgtctcgaagaatttcaataagaaagtggtggagaagatgggactggtgtatcttgttcaatactctccggaccagtttaaaagttccaacattgcgaagaaagaactcagaaaagaattgatggatctgggctttaaagtccgctatataagcgaaaattacaagatgatggcgatcgaaggtacagccactcttcaggcagtacaccctaaccaaaactggcattataatatgattaaagctccggaagcgtgggctattacgtctggatcctctagcgttaaagtagcagtcctggatacagggatcgaccataatcacccatccttggccaacttcgtgaatactaatcttggccggtcgtttgttggaggaaacaccatggatgttcaaggtcatggcacacatgttgctggcacgattgcatcttatgggagtgtaagcggagtgatgcagagtgcgacactgatcccggtcaaagtgctcgataattctggcagcgggtccctttacggtattacgcaaggcatattgtatgccgccgacatcgatgcggacgtcattaacatgtctctgggtggaggaggctataatcagagcatggatgaggctgttcaagcggcagttgctcagggaaccattgtagtagcagcgactggcaatgatggtgcatcgtcgatcagttatcctgctgcctacagcagcgtcattgcggtgggatctgtgacgtccaatcgtacacgatcctcgttttctaactatggatctgggcttgaagttatggcaccgggcagcaacatctacagtacgtatcctaattccagatatacatctttgagtggtacaagcatggctactccgcacgttgcgggcgtagctgggctcattcgcgcagccaacccagacatatctgtcgcgcaagcccgtcagattctgcgggataccgcgcaagaagcaggatcgttcacacagtacggctatggaatcgtcgatgctcatgccgccgttgttgctgcatccggtggtagcggcggc

SEQ ID NO: 736 - protein, 413 aa, synthetic construct
  REGION 1..413: note = Variant of serine peptidase from Bacillus sinesaloumensis
MADQASQANGNQDVIEGELIVSVEPKNGKPDVSIQSAQSVTGQEDVLKSKGFTIVDTLHVEDSSVKPLVSKNFNKKVVEKMGLVYLVQYSPDQFKSSNIAKKELRKELMDLGFKVRYISENYKMMAIEGTATLQAVHPNQNWHYNMIKAPEAWAITSGSSSVKVAVLDTGIDHNHPSLANFVNTNLGRSFVGGNTMDVQGHGTHVAGTIASYGSVSGVMQSATLIPVKVLDNSGSGSLYGITQGILYAADIDADVINMSLGGGGYNQSMDEAVQAAVAQGTIVVAATGNDGASSISYPAAYSSVIAVGSVTSNRTRSSFSNYGSGLEVMAPGSNIYSTYPNSRYTSLSGTSMATPHVAGVAGLIRAANPDISVAQARQILRDTAQEAGSFTQYGYGIVDAHAAVVAASGGSGG

SEQ ID NO: 737 - DNA, 1239 bp, synthetic construct
  misc_feature 1..1239: note = Variant of serine peptidase from Bacillus sinesaloumensis
  source 1..1239: mol_type = other DNA
atggcagatcaagctagtcaagctaatggaaaccaggacgtcattgaaggcgagctgatcgtttcagtggaaccgaagaacggtaaacctgatgtgagcattcaaagtgcacaatccgtaacagggcaggaagacgtccttaaatcgaaaggctttacgatcgttgataccttgcatgtagaggatagcagcgtcaagccactcgtctcgaagaatttcaataagaaagtggtggagaagatgggactggtgtatcttgttcaatactctccggaccagtttaaaagttccaacattgcgaagaaagaactcagaaaagaattgatggatctgggctttaaagtccgctatataagcgaaaattacaagatgatggcgatcgaaggtacagccactcttcaggcagtacaccctaaccaaaactggcattataatatgattaaagctccggaagcgtgggctattacgtctggatcctctagcgttaaagtagcagtcctggatacagggatcgaccataatcacccatccttggccaacttcgtgaatactaatcttggccggtcgtttgttggaggaaacaccatggatgttcaaggtcatggcacacatgttgctggcacgattgcatcttatgggagtgtaagcggagtgatgcagagtgcgacactgatcccggtcaaagtgctcgataattctggcagcgggtccctttacggtattacgcaaggcatattgtatgccatggacatcgatgcggacgtcattaacatgtctctgggtggaggaggctataatcagagcatggatgaggctgttcaaacagcagttgctcagggaaccattgtagtagcagcgactggcaatgatggtgcatcgtcgatcagttatcctgctgcctacagcagcgtcattgcggtgggatctgtgacgtccaatcgtacacgatcctcgttttctaactatggatctgggcttgaagttatggcaccgggcagcaacatctacagtacgtatcctaattccagatatacatctttgagtggtacaagcatggctactccgcacgttgcgggcgtagctgggctcattcgcgcagccaacccagacatatctgtcgcgcaagcccgtcagattctgcgggataccgcgcaagaagcaggatcgttcacacagtacggctatggaatcgtcgatgctcatgccgccgttgttgctgcatccggtggtagcggcggc

SEQ ID NO: 738 - protein, 413 aa, synthetic construct
  REGION 1..413: note = Variant of serine peptidase from Bacillus sinesaloumensis
MADQASQANGNQDVIEGELIVSVEPKNGKPDVSIQSAQSVTGQEDVLKSKGFTIVDTLHVEDSSVKPLVSKNFNKKVVEKMGLVYLVQYSPDQFKSSNIAKKELRKELMDLGFKVRYISENYKMMAIEGTATLQAVHPNQNWHYNMIKAPEAWAITSGSSSVKVAVLDTGIDHNHPSLANFVNTNLGRSFVGGNTMDVQGHGTHVAGTIASYGSVSGVMQSATLIPVKVLDNSGSGSLYGITQGILYAMDIDADVINMSLGGGGYNQSMDEAVQTAVAQGTIVVAATGNDGASSISYPAAYSSVIAVGSVTSNRTRSSFSNYGSGLEVMAPGSNIYSTYPNSRYTSLSGTSMATPHVAGVAGLIRAANPDISVAQARQILRDTAQEAGSFTQYGYGIVDAHAAVVAASGGSGG

SEQ ID NO: 739 - DNA, 1239 bp, synthetic construct
  misc_feature 1..1239: note = Variant of serine peptidase from Bacillus sinesaloumensis
  source 1..1239: mol_type = other DNA
atggcagatcaagctagtcaagctaatggaaaccaggacgtcattgaaggcgagctgatcgtttcagtggaaccgaagaacggtaaacctgatgtgagcattcaaagtgcacaatccgtaacagggcaggaagacgtccttaaatcgaaaggctttacgatcgttgataccttgcatgtagaggatagcagcgtcaagccactcgtctcgaagaatttcaataagaaagtggtggagaagatgggactggtgtatcttgttcaatactctccggaccagtttaaaagttccaacattgcgaagaaagaactcagaaaagaattgatggatctgggctttaaagtccgctatataagcgaaaattacaagatgatggcgatcgaaggtacagccactcttcaggcagtacaccctaaccaaaactggcattataatatgattaaagctccggaagcgtgggctattacgtctggatcctctagcgttaaagtagcagtcctggatacagggatcgaccataatcacccatccttggccaacttcgtgaatactaatcttggccggtcgtttgttggaggaaacaccatggatgttcaaggtcatggcacacatgttgctggcacgattgcatcttatgggagtgtaagcggagtgatgcagagtgcgacactgatcccggtcaaagtgctcgataattctggcagcgggtccctttacggtattacgcaaggcatattgtatgccgccgacatcgatgcggacgtcattaacatgtctctgggtggaggaggctataatcagagcatggatgaggctgttcaaacagcagttgctcagggaaccattgtagtagcagcgactggcaatgatggtgcatcgtcgatcagttatcctgctgcctacagcagcgtcattgcggtgggatctgtgacgtccaatcgtacacgatcctcgttttctaactatggatctgggcttgaagttatggcaccgggcagcaacatctacagtacgtatcctaattccagatatacatctttgagtggtacaagcatggctactccgcacgttgcgggcgtagctgggctcgtgcgcgcagccaacccagacatatctgtcgcgcaagcccgtcagattctgcgggataccgcgcaagaagcaggatcgttcacacagtacggctatggaatcgtcgatgctcatgccgccgttgttgctgcatccggtggtagcggcggc

SEQ ID NO: 740 - protein, 413 aa, synthetic construct
  REGION 1..413: note = Variant of serine peptidase from Bacillus sinesaloumensis
MADQASQANGNQDVIEGELIVSVEPKNGKPDVSIQSAQSVTGQEDVLKSKGFTIVDTLHVEDSSVKPLVSKNFNKKVVEKMGLVYLVQYSPDQFKSSNIAKKELRKELMDLGFKVRYISENYKMMAIEGTATLQAVHPNQNWHYNMIKAPEAWAITSGSSSVKVAVLDTGIDHNHPSLANFVNTNLGRSFVGGNTMDVQGHGTHVAGTIASYGSVSGVMQSATLIPVKVLDNSGSGSLYGITQGILYAADIDADVINMSLGGGGYNQSMDEAVQTAVAQGTIVVAATGNDGASSISYPAAYSSVIAVGSVTSNRTRSSFSNYGSGLEVMAPGSNIYSTYPNSRYTSLSGTSMATPHVAGVAGLVRAANPDISVAQARQILRDTAQEAGSFTQYGYGIVDAHAAVVAASGGSGG

SEQ ID NO: 741 - DNA, 1239 bp, synthetic construct
  misc_feature 1..1239: note = Variant of serine peptidase from Bacillus sinesaloumensis
  source 1..1239: mol_type = other DNA
atggcagatcaagctagtcaagctaatggaaaccaggacgtcattgaaggcgagctgatcgtttcagtggaaccgaagaacggtaaacctgatgtgagcattcaaagtgcacaatccgtaacagggcaggaagacgtccttaaatcgaaaggctttacgatcgttgataccttgcatgtagaggatagcagcgtcaagccactcgtctcgaagaatttcaataagaaagtggtggagaagatgggactggtgtatcttgttcaatactctccggaccagtttaaaagttccaacattgcgaagaaagaactcagaaaagaattgatggatctgggctttaaagtccgctatataagcgaaaattacaagatgatggcgatcgaaggtacagccactcttcaggcagtacaccctaaccaaaactggcattataatatgattaaagctccggaagcgtgggctattacgtctggatcctctagcgttaaagtagcagtcctggatacagggatcgaccataatcacccatccttggccaacttcgtgaatactaatcttggccggtcgtttgttggaggaaacaccatggatgttcaaggtcatggcacacatgttgctggcacgattgcatcttatgggagtgtaagcggagtgatgcagagtgcgacactgatcccggtcaaagtgctcgataattctggcagcgggtccctttacggtattacgcaaggcatattgtatgccgccgacatcgatgcggacgtcattaacatgtctctgggtggaggaggctataatcagagcatggatgaggctgttcaaacagcagttgctcagggaaccattgtagtagcagcgactggcaatgatggtgcatcgtcgatcagttatcctgctgcctacagcgtggtcattgcggtgggatctgtgacgtccaatcgtacacgatcctcgttttctaactatggatctgggcttgaagttatggcaccgggcagcaacatctacagtacgtatcctaattccagatatacatctttgagtggtacaagcatggctactccgcacgttgcgggcgtagctgggctcattcgcgcagccaacccagacatatctgtcgcgcaagcccgtcagattctgcgggataccgcgcaagaagcaggatcgttcacacagtacggctatggaatcgtcgatgctcatgccgccgttgttgctgcatccggtggtagcggcggc

SEQ ID NO: 742 - protein, 413 aa, synthetic construct
  REGION 1..413: note = Variant of serine peptidase from Bacillus sinesaloumensis
MADQASQANGNQDVIEGELIVSVEPKNGKPDVSIQSAQSVTGQEDVLKSKGFTIVDTLHVEDSSVKPLVSKNFNKKVVEKMGLVYLVQYSPDQFKSSNIAKKELRKELMDLGFKVRYISENYKMMAIEGTATLQAVHPNQNWHYNMIKAPEAWAITSGSSSVKVAVLDTGIDHNHPSLANFVNTNLGRSFVGGNTMDVQGHGTHVAGTIASYGSVSGVMQSATLIPVKVLDNSGSGSLYGITQGILYAADIDADVINMSLGGGGYNQSMDEAVQTAVAQGTIVVAATGNDGASSISYPAAYSVVIAVGSVTSNRTRSSFSNYGSGLEVMAPGSNIYSTYPNSRYTSLSGTSMATPHVAGVAGLIRAANPDISVAQARQILRDTAQEAGSFTQYGYGIVDAHAAVVAASGGSGG

SEQ ID NO: 743 - DNA, 1239 bp, synthetic construct
  misc_feature 1..1239: note = Variant of serine peptidase from Bacillus sinesaloumensis
  source 1..1239: mol_type = other DNA
atggcagatcaagctagtcaagctaatggaaaccaggacgtcattgaaggcgagctgatcgtttcagtggaaccgaagaacggtaaacctgatgtgagcattcaaagtgcacaatccgtaacagggcaggaagacgtccttaaatcgaaaggctttacgatcgttgataccttgcatgtagaggatagcagcgtcaagccactcgtctcgaagaatttcaataagaaagtggtggagaagatgggactggtgtatcttgttcaatactctccggaccagtttaaaagttccaacattgcgaagaaagaactcagaaaagaattgatggatctgggctttaaagtccgctatataagcgaaaattacaagatgatggcgatcgaaggtacagccactcttcaggcagtacaccctaaccaaaactggcattataatatgattaaagctccggaagcgtgggctattacgtctggatcctctagcgttaaagtagcagtcctggatacagggatcgaccataatcacccatccttggccaacttcgtgaatactaatcttggccggtcgtttgttggaggaaacaccatggatgttcaaggtcatggcacacatgttgctggcacgattgcatcttatgggagtgtaagcggagtgatgcagagtgcgacactgatcccggtcaaagtgctcgataattctggcagcgggtccctttacggtattacgcaaggcatattgtatgccgccgacatcgatgcggacgtcattaacatgtctctgggtggaggaggctataatcagagcatggatgaggctgttcaaacagcagttgctcagggaaccattgtagtagcagcgactggcaatgatggtgcatcgtcgatcagttatcctgctaggtacagcagcgtcattgcggtgggatctgtgacgtccaatcgtacacgatcctcgttttctaactatggatctgggcttgaagttatggcaccgggcagcaacatctacagtacgtatcctaattccagatatacatctttgagtggtacaagcatggctactccgcacgttgcgggcgtagctgggctcattcgcgcagccaacccagacatatctgtcgcgcaagcccgtcagattctgcgggataccgcgcaagaagcaggatcgttcacacagtacggctatggaatcgtcgatgctcatgccgccgttgttgctgcatccggtggtagcggcggc

SEQ ID NO: 744 - protein, 413 aa, synthetic construct
  REGION 1..413: note = Variant of serine peptidase from Bacillus sinesaloumensis
MADQASQANGNQDVIEGELIVSVEPKNGKPDVSIQSAQSVTGQEDVLKSKGFTIVDTLHVEDSSVKPLVSKNFNKKVVEKMGLVYLVQYSPDQFKSSNIAKKELRKELMDLGFKVRYISENYKMMAIEGTATLQAVHPNQNWHYNMIKAPEAWAITSGSSSVKVAVLDTGIDHNHPSLANFVNTNLGRSFVGGNTMDVQGHGTHVAGTIASYGSVSGVMQSATLIPVKVLDNSGSGSLYGITQGILYAADIDADVINMSLGGGGYNQSMDEAVQTAVAQGTIVVAATGNDGASSISYPARYSSVIAVGSVTSNRTRSSFSNYGSGLEVMAPGSNIYSTYPNSRYTSLSGTSMATPHVAGVAGLIRAANPDISVAQARQILRDTAQEAGSFTQYGYGIVDAHAAVVAASGGSGG

SEQ ID NO: 745 - DNA, 1239 bp, synthetic construct
  misc_feature 1..1239: note = Variant of serine peptidase from Bacillus sinesaloumensis
  source 1..1239: mol_type = other DNA
atggcagatcaagctagtcaagctaatggaaaccaggacgtcattgaaggcgagctgatcgtttcagtggaaccgaagaacggtaaacctgatgtgagcattcaaagtgcacaatccgtaacagggcaggaagacgtccttaaatcgaaaggctttacgatcgttgataccttgcatgtagaggatagcagcgtcaagccactcgtctcgaagaatttcaataagaaagtggtggagaagatgggactggtgtatcttgttcaatactctccggaccagtttaaaagttccaacattgcgaagaaagaactcagaaaagaattgatggatctgggctttaaagtccgctatataagcgaaaattacaagatgatggcgatcgaaggtacagccactcttcaggcagtacaccctaaccaaaactggcattataatatgattaaagctccggaagcgtgggctattacgtctggatcctctagcgttaaagtagcagtcctggatacagggatcgaccataatcacccatccttggccaacttcgtgaatactaatcttggccggtcgtttgttggaggaaacaccatggatgttcaaggtcatggcacacatgttgctggcacgattgcatcttatgggagtgtaagcggagtgatgcagagtgcgacactgatcccggtcaaagtgctcgataattctggcagcgggtcccttatgggtattacgcaaggcatattgtatgccgccgacatcgatgcggacgtcattaacatgtctctgggtggaggaggctataatcagagcatggatgaggctgttcaaacagcagttgctcagggaaccattgtagtagcagcgactggcaatgatggtgcatcgtcgatcagttatcctgctgcctacagcagcgtcattgcggtgggatctgtgacgtccaatcgtacacgatcctcgttttctaactatggatctgggcttgaagttatggcaccgggcagcaacatctacagtacgtatcctaattccagatatacatctttgagtggtacaagcatggctactccgcacgttgcgggcgtagctgggctcattcgcgcagccaacccagacatatctgtcgcgcaagcccgtcagattctgcgggataccgcgcaagaagcaggatcgttcacacagtacggctatggaatcgtcgatgctcatgccgccgttgttgctgcatccggtggtagcggcggc

SEQ ID NO: 746 - protein, 413 aa, synthetic construct
  REGION 1..413: note = Variant of serine peptidase from Bacillus sinesaloumensis
MADQASQANGNQDVIEGELIVSVEPKNGKPDVSIQSAQSVTGQEDVLKSKGFTIVDTLHVEDSSVKPLVSKNFNKKVVEKMGLVYLVQYSPDQFKSSNIAKKELRKELMDLGFKVRYISENYKMMAIEGTATLQAVHPNQNWHYNMIKAPEAWAITSGSSSVKVAVLDTGIDHNHPSLANFVNTNLGRSFVGGNTMDVQGHGTHVAGTIASYGSVSGVMQSATLIPVKVLDNSGSGSLMGITQGILYAADIDADVINMSLGGGGYNQSMDEAVQTAVAQGTIVVAATGNDGASSISYPAAYSSVIAVGSVTSNRTRSSFSNYGSGLEVMAPGSNIYSTYPNSRYTSLSGTSMATPHVAGVAGLIRAANPDISVAQARQILRDTAQEAGSFTQYGYGIVDAHAAVVAASGGSGG

SEQ ID NO: 747 - DNA, 1239 bp, synthetic construct
  misc_feature 1..1239: note = Variant of serine peptidase from Bacillus sinesaloumensis
  source 1..1239: mol_type = other DNA
atggcagatcaagctagtcaagctaatggaaaccaggacgtcattgaaggcgagctgatcgtttcagtggaaccgaagaacggtaaacctgatgtgagcattcaaagtgcacaatccgtaacagggcaggaagacgtccttaaatcgaaaggctttacgatcgttgataccttgcatgtagaggatagcagcgtcaagccactcgtctcgaagaatttcaataagaaagtggtggagaagatgggactggtgtatcttgttcaatactctccggaccagtttaaaagttccaacattgcgaagaaagaactcagaaaagaattgatggatctgggctttaaagtccgctatataagcgaaaattacaagatgatggcgatcgaaggtacagccactcttcaggcagtacaccctaaccaaaactggcattataatatgattaaagctccggaagcgtgggctattacgtctggatcctctagcgttaaagtagcagtcctggatacagggatcgaccataatcacccatccttggccaacttcgtgaatactaatcttggccggtcgtttgttggaggaaacaccatggatgttcaaggtcatggcacacatgttgctggcacgattgcatcttatgggagtgtaagcggagtgatgcagagtgcgacactgatcccggtcaaagtgctcgataattctggcagcgggtccctttacggtattacgcaaggcatattgtatgccgccgacatcgatgcggacgtcattaacatgtctctgggtggaggaggctataatcagagcactgatgaggctgttcaaacagcagttgctcagggaaccattgtagtagcagcgactggcaatgatggtgcatcgtcgatcagttatcctgctgcctacagcagcgtcattgcggtgggatctgtgacgtccaatcgtacacgatcctcgttttctaactatggatctgggcttgaagttatggcaccgggcagcaacatctacagtacgtatcctaattccagatatacatctttgagtggtacaagcatggctactccgcacgttgcgggcgtagctgggctcattcgcgcagccaacccagacatatctgtcgcgcaagcccgtcagattctgcgggataccgcgcaagaagcaggatcgttcacacagtacggctatggaatcgtcgatgctcatgccgccgttgttgctgcatccggtggtagcggcggc

SEQ ID NO: 748 - protein, 413 aa, synthetic construct
  REGION 1..413: note = Variant of serine peptidase from Bacillus sinesaloumensis
MADQASQANGNQDVIEGELIVSVEPKNGKPDVSIQSAQSVTGQEDVLKSKGFTIVDTLHVEDSSVKPLVSKNFNKKVVEKMGLVYLVQYSPDQFKSSNIAKKELRKELMDLGFKVRYISENYKMMAIEGTATLQAVHPNQNWHYNMIKAPEAWAITSGSSSVKVAVLDTGIDHNHPSLANFVNTNLGRSFVGGNTMDVQGHGTHVAGTIASYGSVSGVMQSATLIPVKVLDNSGSGSLYGITQGILYAADIDADVINMSLGGGGYNQSTDEAVQTAVAQGTIVVAATGNDGASSISYPAAYSSVIAVGSVTSNRTRSSFSNYGSGLEVMAPGSNIYSTYPNSRYTSLSGTSMATPHVAGVAGLIRAANPDISVAQARQILRDTAQEAGSFTQYGYGIVDAHAAVVAASGGSGG

SEQ ID NO: 749 - DNA, 1239 bp, synthetic construct
  misc_feature 1..1239: note = Variant of serine peptidase from Bacillus sinesaloumensis
  source 1..1239: mol_type = other DNA
atggcagatcaagctagtcaagctaatggaaaccaggacgtcattgaaggcgagctgatcgtttcagtggaaccgaagaacggtaaacctgatgtgagcattcaaagtgcacaatccgtaacagggcaggaagacgtccttaaatcgaaaggctttacgatcgttgataccttgcatgtagaggatagcagcgtcaagccactcgtctcgaagaatttcaataagaaagtggtggagaagatgggactggtgtatcttgttcaatactctccggaccagtttaaaagttccaacattgcgaagaaagaactcagaaaagaattgatggatctgggctttaaagtccgctatataagcgaaaattacaagatgatggcgatcgaaggtacagccactcttcagggggtgcaccctaaccaacaatggcattataatatgattaaagctccggaagcgtgggctattacgtctggatcctcgagcgttaaagtagcagtcctggatacagggatcgaccataatcacccatccttggccaacttcgtgaatactaatcttggccgctcgtttgttggaggaaacaccatggatgttcaaggtcatggcacacatgttgctggcacgattgcatcttatgggagtgtaagcggagtgatgcagagtgcgacactgatcccggtcaaagtgctcgataattctggcagcgggtccctttacggtattacgcaaggcatattgtatgccgccgacatcgatgcggacgtcattaacatgtctctgggtggaggaggctataatcagagcatggatgaggctgttcaaacagcagttgctcagggaaccattgtagtagcagcgactggcaatgatggtgcatcgtcgatcagttatcctgctgcctacagcagcgtcattgcggtgggatctgtgacgtccaatcgtacacgatcctcgttttctaactatggatctgggcttgaagttatggcaccgggcagcaacatctacagtacgtatcctaattccagatatacatctttgagtggtacaagcatggctactccgcacgttgcgggcgtagctgggctcattcgcgcagccaacccagacatactggtcgcgcaagcccgtcagattctgcgggataccgcgcaagaagcaggatcgttcacacagtacggctatggaatcgtcgatgctcatgccgccgttgttgctgcatccggtggtagcggcggc

SEQ ID NO: 750 - protein, 413 aa, synthetic construct
  REGION 1..413: note = Variant of serine peptidase from Bacillus sinesaloumensis
MADQASQANGNQDVIEGELIVSVEPKNGKPDVSIQSAQSVTGQEDVLKSKGFTIVDTLHVEDSSVKPLVSKNFNKKVVEKMGLVYLVQYSPDQFKSSNIAKKELRKELMDLGFKVRYISENYKMMAIEGTATLQGVHPNQQWHYNMIKAPEAWAITSGSSSVKVAVLDTGIDHNHPSLANFVNTNLGRSFVGGNTMDVQGHGTHVAGTIASYGSVSGVMQSATLIPVKVLDNSGSGSLYGITQGILYAADIDADVINMSLGGGGYNQSMDEAVQTAVAQGTIVVAATGNDGASSISYPAAYSSVIAVGSVTSNRTRSSFSNYGSGLEVMAPGSNIYSTYPNSRYTSLSGTSMATPHVAGVAGLIRAANPDILVAQARQILRDTAQEAGSFTQYGYGIVDAHAAVVAASGGSGG

SEQ ID NO: 751 - DNA, 1239 bp, synthetic construct
  misc_feature 1..1239: note = Variant of serine peptidase from Bacillus sinesaloumensis
  source 1..1239: mol_type = other DNA
atggcagatcaagctagtcaagctaatggaaaccaggacgtcattgaaggcgagctgatcgtttcagtggaaccgaagaacggtaaacctgatgtgagcattcaaagtgcacaatccgtaacagggcaggaagacgtccttaaatcgaaaggctttacgatcgttgataccttgcatgtagaggatagcagcgtcaagccactcgtctcgaagaatttcaataagaaagtggtggagaagatgggactggtgtatcttgttcaatactctccggaccagtttaaaagttccaacattgcgaagaaagaactcagaaaagaattgatggatctgggctttaaagtccgctatataagcgaaaattacaagatgatggcgatcgaaggtacagccactcttcaggcagtacaccctaaccaaaactggcattataatatgattaaagctccggaagcgtgggctattacgtctggatcctctagcgttaaagtagcagtcctggatacagggatcgaccataatcacccatccttggccaacttcgtgaatactaatcttggccggtcgtttgttggaggaaacaccatggatgttcaaggtcatggcacacatgttgctggcacgattgcatcttatgggagtgtaagcggagtgatgcagagtgcgacactgatcccggtcaaagtgctcgataattctggcagcgggtccctttacggtattacgcaaggcatattgtatgccgccgacatcgatgcggacgtcattaacatgtctctgggtggaggaggctataatcagagcatggatgaggctgttcaaacagcagttgctcagggaaccattgtagtagcagcgactggcaatgatggtgcatcgtcgatcagttatcctgctgcctacagcagcgtcattgcggtgggatctgtggactccaatcgtgttcgatcctcgttttctaactatggatctgggcttgaagttatggcaccgggcagcaacatctacagtacgtatcctaattccagatatacatctttgagtggtacaagcatggctactccgcacgttgcgggcgtagctgggctcattcgcgcagccaacccagacatactggtcgcgcaagcccgtcagattctgcgggataccgcgcaagaagcaggatcgttcacacagtacggctatggaatcgtcgatgctcatgccgccgttgttgctgcatccggtggtagcggcggc

SEQ ID NO: 752 - protein, 413 aa, synthetic construct
  REGION 1..413: note = Variant of serine peptidase from Bacillus sinesaloumensis
MADQASQANGNQDVIEGELIVSVEPKNGKPDVSIQSAQSVTGQEDVLKSKGFTIVDTLHVEDSSVKPLVSKNFNKKVVEKMGLVYLVQYSPDQFKSSNIAKKELRKELMDLGFKVRYISENYKMMAIEGTATLQAVHPNQNWHYNMIKAPEAWAITSGSSSVKVAVLDTGIDHNHPSLANFVNTNLGRSFVGGNTMDVQGHGTHVAGTIASYGSVSGVMQSATLIPVKVLDNSGSGSLYGITQGILYAADIDADVINMSLGGGGYNQSMDEAVQTAVAQGTIVVAATGNDGASSISYPAAYSSVIAVGSVDSNRVRSSFSNYGSGLEVMAPGSNIYSTYPNSRYTSLSGTSMATPHVAGVAGLIRAANPDILVAQARQILRDTAQEAGSFTQYGYGIVDAHAAVVAASGGSGG

SEQ ID NO: 753 - DNA, 1239 bp, synthetic construct
  misc_feature 1..1239: note = Variant of serine peptidase from Bacillus sinesaloumensis
  source 1..1239: mol_type = other DNA
atggcagatcaagctagtcaagctaatggaaaccaggacgtcattgaaggcgagctgatcgtttcagtggaaccgaagaacggtaaacctgatgtgagcattcaaagtgcacaatccgtaacagggcaggaagacgtccttaaatcgaaaggctttacgatcgttgataccttgcatgtagaggatagcagcgtcaagccactcgtctcgaagaatttcaataagaaagtggtggagaagatgggactggtgtatcttgttcaatactctccggaccagtttaaaagttccaacattgcgaagaaagaactcagaaaagaattgatggatctgggctttaaagtccgctatataagcgaaaattacaagatgatggcgatcgaaggtacagccactcttcaggcgatgcaccctaaccaagtttggcattataatatgattaaagctccggaagcgtgggctattacgtctggatcctcgagcgttaaagtagcagtcctggatacagggatcgaccataatcacccatccttggccaacttcgtgaatactaatcttggccggtcgtttgttggaggaaacaccatggatgttcaaggtcatggcacacatgttgctggcacgattgcatcttatgggagtgtaagcggagtgatgcagagtgcgacactgatcccggtcaaagtgctcgataattctggcagcgggtccctttacggtattacgcaaggcatattgtatgccgccgacatcgatgcggacgtcattaacatgtctctgggtggaggaggctataatcagagcatggatgaggctgttcaaacagcagttgctcagggaaccattgtagtagcagcgactggcaatgatggtgcatcgtcgatcagttatcctgctgcctacagcagcgtcattgcggtgggatctgtggactccaatcgtacccgatcctcgttttctaactatggatctgggcttgaagttatggcaccgggcagcaacatctacagtacgtatcctaattccagatatacatctttgagtggtacaagcatggctactccgcacgttgcgggcgtagctgggctcattcgcgcagccaacccagacatatctgtcgcgcaagcccgtcagattctgcgggataccgcgcaagaagcaggatcgttcacacagtacggctatggaatcgtcgatgctcatgccgccgttgttgctgcatccggtggtagcggcggc

SEQ ID NO: 754 - protein, 413 aa, synthetic construct
  REGION 1..413: note = Variant of serine peptidase from Bacillus sinesaloumensis
MADQASQANGNQDVIEGELIVSVEPKNGKPDVSIQSAQSVTGQEDVLKSKGFTIVDTLHVEDSSVKPLVSKNFNKKVVEKMGLVYLVQYSPDQFKSSNIAKKELRKELMDLGFKVRYISENYKMMAIEGTATLQAMHPNQVWHYNMIKAPEAWAITSGSSSVKVAVLDTGIDHNHPSLANFVNTNLGRSFVGGNTMDVQGHGTHVAGTIASYGSVSGVMQSATLIPVKVLDNSGSGSLYGITQGILYAADIDADVINMSLGGGGYNQSMDEAVQTAVAQGTIVVAATGNDGASSISYPAAYSSVIAVGSVDSNRTRSSFSNYGSGLEVMAPGSNIYSTYPNSRYTSLSGTSMATPHVAGVAGLIRAANPDISVAQARQILRDTAQEAGSFTQYGYGIVDAHAAVVAASGGSGG

SEQ ID NO: 755 - DNA, 1239 bp, synthetic construct
  misc_feature 1..1239: note = Variant of serine peptidase from Bacillus sinesaloumensis
  source 1..1239: mol_type = other DNA
atggcagatcaagctagtcaagctaatggaaaccaggacgtcattgaaggcgagctgatcgtttcagtggaaccgaagaacggtaaacctgatgtgagcattcaaagtgcacaatccgtaacagggcaggaagacgtccttaaatcgaaaggctttacgatcgttgataccttgcatgtagaggatagcagcgtcaagccactcgtctcgaagaatttcaataagaaagtggtggagaagatgggactggtgtatcttgttcaatactctccggaccagtttaaaagttccaacattgcgaagaaagaactcagaaaagaattgatggatctgggctttaaagtccgctatataagcgaaaattacaagatgatggcgatcgaaggtacagccactcttcaggcggtgcaccctaaccaagtttggcattataatatgattaaagctccggaagcgtgggctattacgtctggatcctcgagcgttaaagtagcagtcctggatacagggatcgaccataatcacccatccttggccaacttcgtgaatactaatcttggcatgtcgtttgttggaggaaacaccatggatgttcaaggtcatggcacacatgttgctggcacgattgcatcttatgggagtgtaagcggagtgatgcagagtgcgacactgatcccggtcaaagtgctcgataattctggcagcgggtccctttacggtattacgcaaggcatattgtatgccgccgacatcgatgcggacgtcattaacatgtctctgggtggaggaggctataatcagagcatggatgaggctgttcaaacagcagttgctcagggaaccattgtagtagcagcgactggcaatgatggtgcatcgtcgatcagttatcctgctgcctacagcagcgtcattgcggtgggatctgtgacttccaatcgtacccgatcctcgttttctaactatggatctgggcttgaagttatggcaccgggcagcaacatctacagtacgtatcctaattccagatatacatctttgagtggtacaagcatggctactccgcacgttgcgggcgtagctgggctcattcgcgcagccaacccagacataagtgtcgcgcaagcccgtcagattctgcgggataccgcgcaagaagcaggatcgttcacacagtacggctatggaatcgtcgatgctcatgccgccgttgttgctgcatccggtggtagcggcggc

SEQ ID NO: 756 - protein, 413 aa, synthetic construct
  REGION 1..413: note = Variant of serine peptidase from Bacillus sinesaloumensis
MADQASQANGNQDVIEGELIVSVEPKNGKPDVSIQSAQSVTGQEDVLKSKGFTIVDTLHVEDSSVKPLVSKNFNKKVVEKMGLVYLVQYSPDQFKSSNIAKKELRKELMDLGFKVRYISENYKMMAIEGTATLQAVHPNQVWHYNMIKAPEAWAITSGSSSVKVAVLDTGIDHNHPSLANFVNTNLGMSFVGGNTMDVQGHGTHVAGTIASYGSVSGVMQSATLIPVKVLDNSGSGSLYGITQGILYAADIDADVINMSLGGGGYNQSMDEAVQTAVAQGTIVVAATGNDGASSISYPAAYSSVIAVGSVTSNRTRSSFSNYGSGLEVMAPGSNIYSTYPNSRYTSLSGTSMATPHVAGVAGLIRAANPDISVAQARQILRDTAQEAGSFTQYGYGIVDAHAAVVAASGGSGG

SEQ ID NO: 757 - DNA, 1239 bp, synthetic construct
  misc_feature 1..1239: note = Variant of serine peptidase from Bacillus sinesaloumensis
  source 1..1239: mol_type = other DNA
atggcagatcaagctagtcaagctaatggaaaccaggacgtcattgaaggcgagctgatcgtttcagtggaaccgaagaacggtaaacctgatgtgagcattcaaagtgcacaatccgtaacagggcaggaagacgtccttaaatcgaaaggctttacgatcgttgataccttgcatgtagaggatagcagcgtcaagccactcgtctcgaagaatttcaataagaaagtggtggagaagatgggactggtgtatcttgttcaatactctccggaccagtttaaaagttccaacattgcgaagaaagaactcagaaaagaattgatggatctgggctttaaagtccgctatataagcgaaaattacaagatgatggcgatcgaaggtacagccactcttcaggagatgcaccctaaccaaaactggcattataatatgattaaagctccggaagcgtgggctattacgtctggatcctcgagcgttaaagtagcagtcctggatacagggatcgaccataatcacccatccttggccaacttcgtgaatactaatcttggccgctcgtttgttggaggaaacaccatggatgttcaaggtcatggcacacatgttgctggcacgattgcatcttatgggagtgtaagcggagtgatgcagagtgcgacactgatcccggtcaaagtgctcgataattctggcagcgggtccctttacggtattacgcaaggcatattgtatgccgccgacatcgatgcggacgtcattaacatgtctctgggtggaggaggctataatcagagcatggatgaggctgttcaaacagcagttgctcagggaaccattgtagtagcagcgactggcaatgatggtgcatcgtcgatcagttatcctgctgcctacagcagcgtcattgcggtgggatctgtgacgtccaatcgtacacgatcctcgttttctaactatggatctgggcttgaagttatggcaccgggcagcaacatctacagtacgtatcctaattccagatatacatctttgagtggtacaagcatggctactccgcacgttgcgggcgtagctgggctcattcgcgcagccaacccagacatatctgtcgcgcaagcccgtcagattctgcgggataccgcgcaagaagcaggatcgttcacacagtacggctatggaatcgtcgatgctcatgccgccgttgttgctgcatccggtggtagcggcggc

SEQ ID NO: 758 - protein, 413 aa, synthetic construct
  REGION 1..413: note = Variant of serine peptidase from Bacillus sinesaloumensis
MADQASQANGNQDVIEGELIVSVEPKNGKPDVSIQSAQSVTGQEDVLKSKGFTIVDTLHVEDSSVKPLVSKNFNKKVVEKMGLVYLVQYSPDQFKSSNIAKKELRKELMDLGFKVRYISENYKMMAIEGTATLQEMHPNQNWHYNMIKAPEAWAITSGSSSVKVAVLDTGIDHNHPSLANFVNTNLGRSFVGGNTMDVQGHGTHVAGTIASYGSVSGVMQSATLIPVKVLDNSGSGSLYGITQGILYAADIDADVINMSLGGGGYNQSMDEAVQTAVAQGTIVVAATGNDGASSISYPAAYSSVIAVGSVTSNRTRSSFSNYGSGLEVMAPGSNIYSTYPNSRYTSLSGTSMATPHVAGVAGLIRAANPDISVAQARQILRDTAQEAGSFTQYGYGIVDAHAAVVAASGGSGG

SEQ ID NO: 759 - DNA, 1239 bp, synthetic construct
  misc_feature 1..1239: note = Variant of serine peptidase from Bacillus sinesaloumensis
  source 1..1239: mol_type = other DNA
atggcagatcaagctagtcaagctaatggaaaccaggacgtcattgaaggcgagctgatcgtttcagtggaaccgaagaacggtaaacctgatgtgagcattcaaagtgcacaatccgtaacagggcaggaagacgtccttaaatcgaaaggctttacgatcgttgataccttgcatgtagaggatagcagcgtcaagccactcgtctcgaagaatttcaataagaaagtggtggagaagatgggactggtgtatcttgttcaatactctccggaccagtttaaaagttccaacattgcgaagaaagaactcagaaaagaattgatggatctgggctttaaagtccgctatataagcgaaaattacaagatgatggcgatcgaaggtacagccactcttcaggcgatgcaccctaaccaacaatggcattataatatgattaaagctccggaagcgtgggctattacgtctggatcctcgagcgttaaagtagcagtcctggatacagggatcgaccataatcacccatccttggccaacttcgtgaatactaatcttggccggtcgtttgttggaggaaacaccatggatgttcaaggtcatggcacacatgttgctggcacgattgcatcttatgggagtgtaagcggagtgatgcagagtgcgacactgatcccggtcaaagtgctcgataattctggcagcgggtccctttacggtattacgcaaggcatattgtatgccgccgacatcgatgcggacgtcattaacatgtctctgggtggaggaggctataatcagagcatggatgaggctgttcaaacagcagttgctcagggaaccattgtagtagcagcgactggcaatgatggtgcatcgtcgatcagttatcctgctgcctacagcagcgtcattgcggtgggatctgtggactccaatcgtacccgatcctcgttttctaactatggatctgggcttgaagttatggcaccgggcagcaacatctacagtacgtatcctaattccagatatacatctttgagtggtacaagcatggctactccgcacgttgcgggcgtagctgggctcattcgcgcagccaacccagacataagtgtcgcgcaagcccgtcagattctgcgggataccgcgcaagaagcaggatcgttcacacagtacggctatggaatcgtcgatgctcatgccgccgttgttgctgcatccggtggtagcggcggc

SEQ ID NO: 760 - protein, 413 aa, synthetic construct
  REGION 1..413: note = Variant of serine peptidase from Bacillus sinesaloumensis
MADQASQANGNQDVIEGELIVSVEPKNGKPDVSIQSAQSVTGQEDVLKSKGFTIVDTLHVEDSSVKPLVSKNFNKKVVEKMGLVYLVQYSPDQFKSSNIAKKELRKELMDLGFKVRYISENYKMMAIEGTATLQAMHPNQQWHYNMIKAPEAWAITSGSSSVKVAVLDTGIDHNHPSLANFVNTNLGRSFVGGNTMDVQGHGTHVAGTIASYGSVSGVMQSATLIPVKVLDNSGSGSLYGITQGILYAADIDADVINMSLGGGGYNQSMDEAVQTAVAQGTIVVAATGNDGASSISYPAAYSSVIAVGSVDSNRTRSSFSNYGSGLEVMAPGSNIYSTYPNSRYTSLSGTSMATPHVAGVAGLIRAANPDISVAQARQILRDTAQEAGSFTQYGYGIVDAHAAVVAASGGSGG

SEQ ID NO: 761 - DNA, 1239 bp, synthetic construct
  misc_feature 1..1239: note = Variant of serine peptidase from Bacillus sinesaloumensis
  source 1..1239: mol_type = other DNA
atggcagatcaagctagtcaagctaatggaaaccaggacgtcattgaaggcgagctgatcgtttcagtggaaccgaagaacggtaaacctgatgtgagcattcaaagtgcacaatccgtaacagggcaggaagacgtccttaaatcgaaaggctttacgatcgttgataccttgcatgtagaggatagcagcgtcaagccactcgtctcgaagaatttcaataagaaagtggtggagaagatgggactggtgtatcttgttcaatactctccggaccagtttaaaagttccaacattgcgaagaaagaactcagaaaagaattgatggatctgggctttaaagtccgctatataagcgaaaattacaagatgatggcgatcgaaggtacagccactcttcaggaggtgcaccctaaccaagtttggcattataatatgattaaagctccggaagcgtgggctattacgtctggatcctctagcgttaaagtagcagtcctggatacagggatcgaccataatcacccatccttggccaacttcgtgaatactaatcttggccggtcgtttgttggaggaaacaccatggatgttcaaggtcatggcacacatgttgctggcacgattgcatcttatgggagtgtaagcggagtgatgcagagtgcgacactgatcccggtcaaagtgctcgataattctggcagcgggtccctttacggtattacgcaaggcatattgtatgccgccgacatcgatgcggacgtcattaacatgtctctgggtggaggaggctataatcagagcatggatgaggctgttcaaacagcagttgctcagggaaccattgtagtagcagcgactggcaatgatggtgcatcgtcgatcagttatcctgctgcctacagcagcgtcattgcggtgggatctgtgacttccaatcgtgttcgatcctcgttttctaactatggatctgggcttgaagttatggcaccgggcagcaacatctacagtacgtatcctaattccagatatacatctttgagtggtacaagcatggctactccgcacgttgcgggcgtagctgggctcattcgcgcagccaacccagacataagtgtcgcgcaagcccgtcagattctgcgggataccgcgcaagaagcaggatcgttcacacagtacggctatggaatcgtcgatgctcatgccgccgttgttgctgcatccggtggtagcggcggc

SEQ ID NO: 762 - protein, 413 aa, synthetic construct
  REGION 1..413: note = Variant of serine peptidase from Bacillus sinesaloumensis
MADQASQANGNQDVIEGELIVSVEPKNGKPDVSIQSAQSVTGQEDVLKSKGFTIVDTLHVEDSSVKPLVSKNFNKKVVEKMGLVYLVQYSPDQFKSSNIAKKELRKELMDLGFKVRYISENYKMMAIEGTATLQEVHPNQVWHYNMIKAPEAWAITSGSSSVKVAVLDTGIDHNHPSLANFVNTNLGRSFVGGNTMDVQGHGTHVAGTIASYGSVSGVMQSATLIPVKVLDNSGSGSLYGITQGILYAADIDADVINMSLGGGGYNQSMDEAVQTAVAQGTIVVAATGNDGASSISYPAAYSSVIAVGSVTSNRVRSSFSNYGSGLEVMAPGSNIYSTYPNSRYTSLSGTSMATPHVAGVAGLIRAANPDISVAQARQILRDTAQEAGSFTQYGYGIVDAHAAVVAASGGSGG

SEQ ID NO: 763 - DNA, 1239 bp, synthetic construct; identical to SEQ ID NO: 539
  misc_feature 1..1239: note = Variant of serine peptidase from Bacillus sinesaloumensis
  source 1..1239: mol_type = other DNA

SEQ ID NO: 764 - protein, 413 aa, synthetic construct; identical to SEQ ID NO: 540
  REGION 1..413: note = Variant of serine peptidase from Bacillus sinesaloumensis

SEQ ID NO: 765 - DNA, 1239 bp, synthetic construct
  misc_feature 1..1239: note = Variant of serine peptidase from Bacillus sinesaloumensis
  source 1..1239: mol_type = other DNA
atggcagatcaagctagtcaagctaatggaaaccaggacgtcattgaaggcgagctgatcgtttcagtggaaccgaagaacggtaaacctgatgtgagcattcaaagtgcacaatccgtaacagggcaggaagacgtccttaaatcgaaaggctttacgatcgttgataccttgcatgtagaggatagcagcgtcaagccactcgtctcgaagaatttcaataagaaagtggtggagaagatgggactggtgtatcttgttcaatactctccggaccagtttaaaagttccaacattgcgaagaaagaactcagaaaagaattgatggatctgggctttaaagtccgctatataagcgaaaattacaagatgatggcgatcgaaggtacagccactcttcaggaggtgcaccctaaccaagtttggcattataatatgattaaagctccggaagcgtgggctattacgtctggatccctgagcgttaaagtagcagtcctggatacagggatcgaccataatcacccatccttggccaacttcgtgaatactaatcttggccggtcgtttgttggaggaaacaccatggatgttcaaggtcatggcacacatgttgctggcacgattgcatcttatgggagtgtaagcggagtgatgcagagtgcgacactgatcccggtcaaagtgctcgataattctggcagcgggtccctttacggtattacgcaaggcatattgtatgccgccgacatcgatgcggacgtcattaacatgtctctgggtggaggaggctataatatcagcatggatgaggctgttcaaacagcagttgctcagggaaccattgtagtagcagcgactggcaatgatggtgcatcgtcgatcagttatcctgctgcctacagcagcgtcattgcggtgggatctgtgacttccaatcgtacccgatcctcgttttctaactatggatctgggcttgaagttatggcaccgggcagcaacatctacagtacgtatcctaattccagatatacatctttgagtggtacaagcatggctactccgcacgttgcgggcgtagctgggctcattcgcgcagccaacccagacatagtggtcgcgcaagcccgtcagattctgcgggataccgcgcaagaagcaggatcgttcacacagtacggctatggaatcgtcgatgctcatgccgccgttgttgctgcatccggtggtagcggcggc

SEQ ID NO: 766 - protein, 413 aa, synthetic construct
  REGION 1..413: note = Variant of serine peptidase from Bacillus sinesaloumensis
MADQASQANGNQDVIEGELIVSVEPKNGKPDVSIQSAQSVTGQEDVLKSKGFTIVDTLHVEDSSVKPLVSKNFNKKVVEKMGLVYLVQYSPDQFKSSNIAKKELRKELMDLGFKVRYISENYKMMAIEGTATLQEVHPNQVWHYNMIKAPEAWAITSGSLSVKVAVLDTGIDHNHPSLANFVNTNLGRSFVGGNTMDVQGHGTHVAGTIASYGSVSGVMQSATLIPVKVLDNSGSGSLYGITQGILYAADIDADVINMSLGGGGYNISMDEAVQTAVAQGTIVVAATGNDGASSISYPAAYSSVIAVGSVTSNRTRSSFSNYGSGLEVMAPGSNIYSTYPNSRYTSLSGTSMATPHVAGVAGLIRAANPDIVVAQARQILRDTAQEAGSFTQYGYGIVDAHAAVVAASGGSGG

SEQ ID NO: 767 - DNA, 1239 bp, synthetic construct
  misc_feature 1..1239: note = Variant of serine peptidase from Bacillus sinesaloumensis
  source 1..1239: mol_type = other DNA
atggcagatcaagctagtcaagctaatggaaaccaggacgtcattgaaggcgagctgatcgtttcagtggaaccgaagaacggtaaacctgatgtgagcattcaaagtgcacaatccgtaacagggcaggaagacgtccttaaatcgaaaggctttacgatcgttgataccttgcatgtagaggatagcagcgtcaagccactcgtctcgaagaatttcaataagaaagtggtggagaagatgggactggtgtatcttgttcaatactctccggaccagtttaaaagttccaacattgcgaagaaagaactcagaaaagaattgatggatctgggctttaaagtccgctatataagcgaaaattacaagatgatggcgatcgaaggtacagccactcttcaggggatgcaccctaaccaagtttggcattataatatgattaaagctccggaagcgtgggctattacgtctggatccctgagcgttaaagtagcagtcctggatacagggatcgaccataatcacccatccttggccaacttcgtgaatactgaacttggcatgtcgtttgttggaggaaacaccatggatgttcaaggtcatggcacacatgttgctggcacgattgcatcttatgggagtgtaagcggagtgatgcagagtgcgacactgatcccggtcaaagtgctcgataattctggcagcgggtccctttacggtattacgcaaggcatattgtatgccgccgacatcgatgcggacgtcattaacatgtctctgggtggaggaggctataatatcagcatggatgaggctgttcaaacagcagttgctcagggaaccattgtagtagcagcgactggcaatgatggtgcatcgtcgatcagttatcctgctgcctacagcagcgtcattgcggtgggatctgtggactccaatcgtgttcgatcctcgttttctaactatggatctgggcttgaagttatggcaccgggcagcaacatctacagtacgtatcctaattccagatatacatctttgagtggtacaagcatggctactccgcacgttgcgggcgtagctgggctcattcgcgcagccaacccagacataagtgtcgcgcaagcccgtcagattctgcgggataccgcgcaagaagcaggatcgttcacacagtacggctatggaatcgtcgatgctcatgccgccgttgttgctgcatccggtggtagcggcggc

SEQ ID NO: 768 - protein, 413 aa, synthetic construct
  REGION 1..413: note = Variant of serine peptidase from Bacillus sinesaloumensis
MADQASQANGNQDVIEGELIVSVEPKNGKPDVSIQSAQSVTGQEDVLKSKGFTIVDTLHVEDSSVKPLVSKNFNKKVVEKMGLVYLVQYSPDQFKSSNIAKKELRKELMDLGFKVRYISENYKMMAIEGTATLQGMHPNQVWHYNMIKAPEAWAITSGSLSVKVAVLDTGIDHNHPSLANFVNTELGMSFVGGNTMDVQGHGTHVAGTIASYGSVSGVMQSATLIPVKVLDNSGSGSLYGITQGILYAADIDADVINMSLGGGGYNISMDEAVQTAVAQGTIVVAATGNDGASSISYPAAYSSVIAVGSVDSNRVRSSFSNYGSGLEVMAPGSNIYSTYPNSRYTSLSGTSMATPHVAGVAGLIRAANPDISVAQARQILRDTAQEAGSFTQYGYGIVDAHAAVVAASGGSGG

SEQ ID NO: 769 - DNA, 1239 bp, synthetic construct
  misc_feature 1..1239: note = Variant of serine peptidase from Bacillus sinesaloumensis
  source 1..1239: mol_type = other DNA
atggcagatcaagctagtcaagctaatggaaaccaggacgtcattgaaggcgagctgatcgtttcagtggaaccgaagaacggtaaacctgatgtgagcattcaaagtgcacaatccgtaacagggcaggaagacgtccttaaatcgaaaggctttacgatcgttgataccttgcatgtagaggatagcagcgtcaagccactcgtctcgaagaatttcaataagaaagtggtggagaagatgggactggtgtatcttgttcaatactctccggaccagtttaaaagttccaacattgcgaagaaagaactcagaaaagaattgatggatctgggctttaaagtccgctatataagcgaaaattacaagatgatggcgatcgaaggtacagccactcttcaggggatgcaccctaaccaaaactggcattataatatgattaaagctccggaagcgtgggctattacgtctggatcctcgagcgttaaagtagcagtcctggatacagggatcgaccataatcacccatccttggccaacttcgtgaatactaatcttggccggtcgtttgttggaggaaacaccatggatgttcaaggtcatggcacacatgttgctggcacgattgcatcttatgggagtgtaagcggagtgatgcagagtgcgacactgatcccggtcaaagtgctcgataattctggcagcgggtccctttacggtattacgcaaggcatattgtatgccgccgacatcgatgcggacgtcattaacatgtctctgggtggaggaggctataatcagagcatggatgaggctgttcaaacagcagttgctcagggaaccattgtagtagcagcgactggcaatgatggtgcatcgtcgatcagttatcctgctgcctacagcagcgtcattgcggtgggatctgtgacttccaatcgtacccgatcctcgttttctaactatggatctgggcttgaagttatggcaccgggcagcaacatctacagtacgtatcctaattccagatatacatctttgagtggtacaagcatggctactccgcacgttgcgggcgtagctgggctcattcgcgcagccaacccagacataagtgtcgcgcaagcccgtcagattctgcgggataccgcgcaagaagcaggatcgttcacacagtacggctatggaatcgtcgatgctcatgccgccgttgttgctgcatccggtggtagcggcggc

SEQ ID NO: 770 - protein, 413 aa, synthetic construct
  REGION 1..413: note = Variant of serine peptidase from Bacillus sinesaloumensis
MADQASQANGNQDVIEGELIVSVEPKNGKPDVSIQSAQSVTGQEDVLKSKGFTIVDTLHVEDSSVKPLVSKNFNKKVVEKMGLVYLVQYSPDQFKSSNIAKKELRKELMDLGFKVRYISENYKMMAIEGTATLQGMHPNQNWHYNMIKAPEAWAITSGSSSVKVAVLDTGIDHNHPSLANFVNTNLGRSFVGGNTMDVQGHGTHVAGTIASYGSVSGVMQSATLIPVKVLDNSGSGSLYGITQGILYAADIDADVINMSLGGGGYNQSMDEAVQTAVAQGTIVVAATGNDGASSISYPAAYSSVIAVGSVTSNRTRSSFSNYGSGLEVMAPGSNIYSTYPNSRYTSLSGTSMATPHVAGVAGLIRAANPDISVAQARQILRDTAQEAGSFTQYGYGIVDAHAAVVAASGGSGG

SEQ ID NO: 771 - DNA, 1239 bp, synthetic construct
  misc_feature 1..1239: note = Variant of serine peptidase from Bacillus sinesaloumensis
  source 1..1239: mol_type = other DNA
atggcagatcaagctagtcaagctaatggaaaccaggacgtcattgaaggcgagctgatcgtttcagtggaaccgaagaacggtaaacctgatgtgagcattcaaagtgcacaatccgtaacagggcaggaagacgtccttaaatcgaaaggctttacgatcgttgataccttgcatgtagaggatagcagcgtcaagccactcgtctcgaagaatttcaataagaaagtggtggagaagatgggactggtgtatcttgttcaatactctccggaccagtttaaaagttccaacattgcgaagaaagaactcagaaaagaattgatggatctgggctttaaagtccgctatataagcgaaaattacaagatgatggcgatcgaaggtacagccactcttcaggcagtacaccctaaccaaaactggcattataatatgattaaagctccggaagcgtgggctattacgtctggatccctgagcgttaaagtagcagtcctggatacagggatcgaccataatcacccatccttggccaacttcgtgaatactgaacttggccgctcgtttgttggaggaaacaccatggatgttcaaggtcatggcacacatgttgctggcacgattgcatcttatgggagtgtaagcggagtgatgcagagtgcgacactgatcccggtcaaagtgctcgataattctggcagcgggtccctttacggtattacgcaaggcatattgtatgccgccgacatcgatgcggacgtcattaacatgtctctgggtggaggaggctataatcagagcatggatgaggctgttcaaacagcagttgctcagggaaccattgtagtagcagcgactggcaatgatggtgcatcgtcgatcagttatcctgctgcctacagcagcgtcattgcggtgggatctgtgacgtccaatcgtacacgatcctcgttttctaactatggatctgggcttgaagttatggcaccgggcagcaacatctacagtacgtatcctaattccagatatacatctttgagtggtacaagcatggctactccgcacgttgcgggcgtagctgggctcattcgcgcagccaacccagacatatctgtcgcgcaagcccgtcagattctgcgggataccgcgcaagaagcaggatcgttcacacagtacggctatggaatcgtcgatgctcatgccgccgttgttgctgcatccggtggtagcggcggc

SEQ ID NO: 772 - protein, 413 aa, synthetic construct
  REGION 1..413: note = Variant of serine peptidase from Bacillus sinesaloumensis
MADQASQANGNQDVIEGELIVSVEPKNGKPDVSIQSAQSVTGQEDVLKSKGFTIVDTLHVEDSSVKPLVSKNFNKKVVEKMGLVYLVQYSPDQFKSSNIAKKELRKELMDLGFKVRYISENYKMMAIEGTATLQAVHPNQNWHYNMIKAPEAWAITSGSLSVKVAVLDTGIDHNHPSLANFVNTELGRSFVGGNTMDVQGHGTHVAGTIASYGSVSGVMQSATLIPVKVLDNSGSGSLYGITQGILYAADIDADVINMSLGGGGYNQSMDEAVQTAVAQGTIVVAATGNDGASSISYPAAYSSVIAVGSVTSNRTRSSFSNYGSGLEVMAPGSNIYSTYPNSRYTSLSGTSMATPHVAGVAGLIRAANPDISVAQARQILRDTAQEAGSFTQYGYGIVDAHAAVVAASGGSGG

SEQ ID NO: 773 - DNA, 1239 bp, synthetic construct
  misc_feature 1..1239: note = Variant of serine peptidase from Bacillus sinesaloumensis
  source 1..1239: mol_type = other DNA
atggcagatcaagctagtcaagctaatggaaaccaggacgtcattgaaggcgagctgatcgtttcagtggaaccgaagaacggtaaacctgatgtgagcattcaaagtgcacaatccgtaacagggcaggaagacgtccttaaatcgaaaggctttacgatcgttgataccttgcatgtagaggatagcagcgtcaagccactcgtctcgaagaatttcaataagaaagtggtggagaagatgggactggtgtatcttgttcaatactctccggaccagtttaaaagttccaacattgcgaagaaagaactcagaaaagaattgatggatctgggctttaaagtccgctatataagcgaaaattacaagatgatggcgatcgaaggtacagccactcttcaggaggtgcaccctaaccaagtttggcattataatatgattaaagctccggaagcgtgggctattacgtctggatcctcgagcgttaaagtagcagtcctggatacagggatcgaccataatcacccatccttggccaacttcgtgaatactaatcttggcatgtcgtttgttggaggaaacaccatggatgttcaaggtcatggcacacatgttgctggcacgattgcatcttatgggagtgtaagcggagtgatgcagagtgcgacactgatcccggtcaaagtgctcgataattctggcagcgggtccctttacggtattacgcaaggcatattgtatgccgccgacatcgatgcggacgtcattaacatgtctctgggtggaggaggctataatcagagcatggatgaggctgttcaaacagcagttgctatgggaaccattgtagtagcagcgactggcaatgatggtgcatcgtcgatcagttatcctgctgcctacagcagcgtcattgcggtgggatctgtggactccaatcgtacccgatcctcgttttctaactatggatctgggcttgaagttatggcaccgggcagcaacatctacagtacgtatcctaattccagatatacatctttgagtggtacaagcatggctactccgcacgttgcgggcgtagctgggctcattcgcgcagccaacccagacataagtgtcgcgcaagcccgtcagattctgcgggataccgcgcaagaagcaggatcgttcacacagtacggctatggaatcgtcgatgctcatgccgccgttgttgctgcatccggtggtagcggcggc

SEQ ID NO: 774 - protein, 413 aa, synthetic construct
  REGION 1..413: note = Variant of serine peptidase from Bacillus sinesaloumensis
MADQASQANGNQDVIEGELIVSVEPKNGKPDVSIQSAQSVTGQEDVLKSKGFTIVDTLHVEDSSVKPLVSKNFNKKVVEKMGLVYLVQYSPDQFKSSNIAKKELRKELMDLGFKVRYISENYKMMAIEGTATLQEVHPNQVWHYNMIKAPEAWAITSGSSSVKVAVLDTGIDHNHPSLANFVNTNLGMSFVGGNTMDVQGHGTHVAGTIASYGSVSGVMQSATLIPVKVLDNSGSGSLYGITQGILYAADIDADVINMSLGGGGYNQSMDEAVQTAVAMGTIVVAATGNDGASSISYPAAYSSVIAVGSVDSNRTRSSFSNYGSGLEVMAPGSNIYSTYPNSRYTSLSGTSMATPHVAGVAGLIRAANPDISVAQARQILRDTAQEAGSFTQYGYGIVDAHAAVVAASGGSGG

SEQ ID NO: 775 - DNA, 1239 bp, synthetic construct
  misc_feature 1..1239: note = Variant of serine peptidase from Bacillus sinesaloumensis
  source 1..1239: mol_type = other DNA
atggcagatcaagctagtcaagctaatggaaaccaggacgtcattgaaggcgagctgatcgtttcagtggaaccgaagaacggtaaacctgatgtgagcattcaaagtgcacaatccgtaacagggcaggaagacgtccttaaatcgaaaggctttacgatcgttgataccttgcatgtagaggatagcagcgtcaagccactcgtctcgaagaatttcaataagaaagtggtggagaagatgggactggtgtatcttgttcaatactctccggaccagtttaaaagttccaacattgcgaagaaagaactcagaaaagaattgatggatctgggctttaaagtccgctatataagcgaaaattacaagatgatggcgatcgaaggtacagccactcttcaggggatgcaccctaaccaacaatggcattataatatgattaaagctccggaagcgtgggctattacgtctggatcctctagcgttaaagtagcagtcctggatacagggatcgaccataatcacccatccttggccaacttcgtgaatactaatcttggccggtcgtttgttggaggaaacaccatggatgttcaaggtcatggcacacatgttgctggcacgattgcatcttatgggagtgtaagcggagtgatgcagagtgcgacactgatcccggtcaaagtgctcgataattctggcagcgggtccctttacggtattacgcaaggcatattgtatgccgccgacatcgatgcggacgtcattaacatgtctctgggtggaggaggctataatcagagcatggatgaggctgttcaaacagcagttgctcagggaaccattgtagtagcagcgactggcaatgatggtgcatcgtcgatcagttatcctgctgcctacagcagcgtcattgcggtgggatctgtgacgtccaatcgtacacgatcctcgttttctaactatggatctgggcttgaagttatggcaccgggcagcaacatctacagtacgtatcctaattccagatatacatctttgagtggtacaagcatggctactccgcacgttgcgggcgtagctgggctcattcgcgcagccaacccagacataagtgtcgcgcaagcccgtcagattctgcgggataccgcgcaagaagcaggatcgttcacacagtacggctatggaatcgtcgatgctcatgccgccgttgttgctgcatccggtggtagcggcggc

SEQ ID NO: 776 - protein, 413 aa, synthetic construct
  REGION 1..413: note = Variant of serine peptidase from Bacillus sinesaloumensis
MADQASQANGNQDVIEGELIVSVEPKNGKPDVSIQSAQSVTGQEDVLKSKGFTIVDTLHVEDSSVKPLVSKNFNKKVVEKMGLVYLVQYSPDQFKSSNIAKKELRKELMDLGFKVRYISENYKMMAIEGTATLQGMHPNQQWHYNMIKAPEAWAITSGSSSVKVAVLDTGIDHNHPSLANFVNTNLGRSFVGGNTMDVQGHGTHVAGTIASYGSVSGVMQSATLIPVKVLDNSGSGSLYGITQGILYAADIDADVINMSLGGGGYNQSMDEAVQTAVAQGTIVVAATGNDGASSISYPAAYSSVIAVGSVTSNRTRSSFSNYGSGLEVMAPGSNIYSTYPNSRYTSLSGTSMATPHVAGVAGLIRAANPDISVAQARQILRDTAQEAGSFTQYGYGIVDAHAAVVAASGGSGG

SEQ ID NO: 777 - DNA, 1239 bp, synthetic construct
  misc_feature 1..1239: note = Variant of serine peptidase from Bacillus sinesaloumensis
  source 1..1239: mol_type = other DNA
atggcagatcaagctagtcaagctaatggaaaccaggacgtcattgaaggcgagctgatcgtttcagtggaaccgaagaacggtaaacctgatgtgagcattcaaagtgcacaatccgtaacagggcaggaagacgtccttaaatcgaaaggctttacgatcgttgataccttgcatgtagaggatagcagcgtcaagccactcgtctcgaagaatttcaataagaaagtggtggagaagatgggactggtgtatcttgttcaatactctccggaccagtttaaaagttccaacattgcgaagaaagaactcagaaaagaattgatggatctgggctttaaagtccgctatataagcgaaaattacaagatgatggcgatcgaaggtacagccactcttcaggggatgcaccctaaccaacaatggcattataatatgattaaagctccggaagcgtgggctattacgtctggatcctctagcgttaaagtagcagtcctggatacagggatcgaccataatcacccatccttggccaacttcgtgaatactaatcttggccgctcgtttgttggaggaaacaccatggatgttcaaggtcatggcacacatgttgctggcacgattgcatcttatgggagtgtaagcggagtgatgcagagtgcgacactgatcccggtcaaagtgctcgataattctggcagcgggtccctttacggtattacgcaaggcatattgtatgccgccgacatcgatgcggacgtcattaacatgtctctgggtggaggaggctataatcagagcatggatgaggctgttcaaacagcagttgctcagggaaccattgtagtagcagcgactggcaatgatggtgcatcgtcgatcagttatcctgctgcctacagcagcgtcattgcggtgggatctgtgacttccaatcgtacccgatcctcgttttctaactatggatctgggcttgaagttatggcaccgggcagcaacatctacagtacgtatcctaattccagatatacatctttgagtggtacaagcatggctactccgcacgttgcgggcgtagctgggctcattcgcgcagccaacccagacatactggtcgcgcaagcccgtcagattctgcgggataccgcgcaagaagcaggatcgttcacacagtacggctatggaatcgtcgatgctcatgccgccgttgttgctgcatccggtggtagcggcggc

SEQ ID NO: 778 - protein, 413 aa, synthetic construct
  REGION 1..413: note = Variant of serine peptidase from Bacillus sinesaloumensis
MADQASQANGNQDVIEGELIVSVEPKNGKPDVSIQSAQSVTGQEDVLKSKGFTIVDTLHVEDSSVKPLVSKNFNKKVVEKMGLVYLVQYSPDQFKSSNIAKKELRKELMDLGFKVRYISENYKMMAIEGTATLQGMHPNQQWHYNMIKAPEAWAITSGSSSVKVAVLDTGIDHNHPSLANFVNTNLGRSFVGGNTMDVQGHGTHVAGTIASYGSVSGVMQSATLIPVKVLDNSGSGSLYGITQGILYAADIDADVINMSLGGGGYNQSMDEAVQTAVAQGTIVVAATGNDGASSISYPAAYSSVIAVGSVTSNRTRSSFSNYGSGLEVMAPGSNIYSTYPNSRYTSLSGTSMATPHVAGVAGLIRAANPDILVAQARQILRDTAQEAGSFTQYGYGIVDAHAAVVAASGGSGG

SEQ ID NO: 779 - DNA, 1239 bp, synthetic construct
  misc_feature 1..1239: note = Variant of serine peptidase from Bacillus sinesaloumensis
  source 1..1239: mol_type = other DNA
atggcagatcaagctagtcaagctaatggaaaccaggacgtcattgaaggcgagctgatcgtttcagtggaaccgaagaacggtaaacctgatgtgagcattcaaagtgcacaatccgtaacagggcaggaagacgtccttaaatcgaaaggctttacgatcgttgataccttgcatgtagaggatagcagcgtcaagccactcgtctcgaagaatttcaataagaaagtggtggagaagatgggactggtgtatcttgttcaatactctccggaccagtttaaaagttccaacattgcgaagaaagaactcagaaaagaattgatggatctgggctttaaagtccgctatataagcgaaaattacaagatgatggcgatcgaaggtacagccactcttcagggggtgcaccctaaccaagtttggcattataatatgattaaagctccggaagcgtgggctattacgtctggatccctgagcgttaaagtagcagtcctggatacagggatcgaccataatcacccatccttggccaacttcgtgaatactgaacttggccgctcgtttgttggaggaaacaccatggatgttcaaggtcatggcacacatgttgctggcacgattgcatcttatgggagtgtaagcggagtgatgcagagtgcgacactgatcccggtcaaagtgctcgataattctggcagcgggtccctttacggtattacgcaaggcatattgtatgccgccgacatcgatgcggacgtcattaacatgtctctgggtggaggaggctataatatcagcatggatgaggctgttcaaacagcagttgctatgggaaccattgtagtagcagcgactggcaatgatggtgcatcgtcgatcagttatcctgctgcctacagcagcgtcattgcggtgggatctgtgacttccaatcgtacccgatcctcgttttctaactatggatctgggcttgaagttatggcaccgggcagcaacatctacagtacgtatcctaattccagatatacatctttgagtggtacaagcatggctactccgcacgttgcgggcgtagctgggctcattcgcgcagccaacccagacataagtgtcgcgcaagcccgtcagattctgcgggataccgcgcaagaagcaggatcgttcacacagtacggctatggaatcgtcgatgctcatgccgccgttgttgctgcatccggtggtagcggcggc

SEQ ID NO: 780 - protein, 413 aa, synthetic construct
  REGION 1..413: note = Variant of serine peptidase from Bacillus sinesaloumensis
MADQASQANGNQDVIEGELIVSVEPKNGKPDVSIQSAQSVTGQEDVLKSKGFTIVDTLHVEDSSVKPLVSKNFNKKVVEKMGLVYLVQYSPDQFKSSNIAKKELRKELMDLGFKVRYISENYKMMAIEGTATLQGVHPNQVWHYNMIKAPEAWAITSGSLSVKVAVLDTGIDHNHPSLANFVNTELGRSFVGGNTMDVQGHGTHVAGTIASYGSVSGVMQSATLIPVKVLDNSGSGSLYGITQGILYAADIDADVINMSLGGGGYNISMDEAVQTAVAMGTIVVAATGNDGASSISYPAAYSSVIAVGSVTSNRTRSSFSNYGSGLEVMAPGSNIYSTYPNSRYTSLSGTSMATPHVAGVAGLIRAANPDISVAQARQILRDTAQEAGSFTQYGYGIVDAHAAVVAASGGSGG

SEQ ID NO: 781 - DNA, 1239 bp, synthetic construct
  misc_feature 1..1239: note = Variant of serine peptidase from Bacillus sinesaloumensis
  source 1..1239: mol_type = other DNA
atggcagatcaagctagtcaagctaatggaaaccaggacgtcattgaaggcgagctgatcgtttcagtggaaccgaagaacggtaaacctgatgtgagcattcaaagtgcacaatccgtaacagggcaggaagacgtccttaaatcgaaaggctttacgatcgttgataccttgcatgtagaggatagcagcgtcaagccactcgtctcgaagaatttcaataagaaagtggtggagaagatgggactggtgtatcttgttcaatactctccggaccagtttaaaagttccaacattgcgaagaaagaactcagaaaagaattgatggatctgggctttaaagtccgctatataagcgaaaattacaagatgatggcgatcgaaggtacagccactcttcagggggtgcaccctaaccaagtttggcattataatatgattaaagctccggaagcgtgggctattacgtctggatccctgagcgttaaagtagcagtcctggatacagggatcgaccataatcacccatccttggccaacttcgtgaatactaatcttggccggtcgtttgttggaggaaacaccatggatgttcaaggtcatggcacacatgttgctggcacgattgcatcttatgggagtgtaagcggagtgatgcagagtgcgacactgatcccggtcaaagtgctcgataattctggcagcgggtccctttacggtattacgcaaggcatattgtatgccgccgacatcgatgcggacgtcattaacatgtctctgggtggaggaggctataatatcagcatggatgaggctgttcaaacagcagttgctcagggaaccattgtagtagcagcgactggcaatgatggtgcatcgtcgatcagttatcctgctgcctacagcagcgtcattgcggtgggatctgtgacgtccaatcgtacacgatcctcgttttctaactatggatctgggcttgaagttatggcaccgggcagcaacatctacagtacgtatcctaattccagatatacatctttgagtggtacaagcatggctactccgcacgttgcgggcgtagctgggctcattcgcgcagccaacccagacatatctgtcgcgcaagcccgtcagattctgcgggataccgcgcaagaagcaggatcgttcacacagtacggctatggaatcgtcgatgctcatgccgccgttgttgctgcatccggtggtagcggcggc

SEQ ID NO: 782 - protein, 413 aa, synthetic construct
  REGION 1..413: note = Variant of serine peptidase from Bacillus sinesaloumensis
MADQASQANGNQDVIEGELIVSVEPKNGKPDVSIQSAQSVTGQEDVLKSKGFTIVDTLHVEDSSVKPLVSKNFNKKVVEKMGLVYLVQYSPDQFKSSNIAKKELRKELMDLGFKVRYISENYKMMAIEGTATLQGVHPNQVWHYNMIKAPEAWAITSGSLSVKVAVLDTGIDHNHPSLANFVNTNLGRSFVGGNTMDVQGHGTHVAGTIASYGSVSGVMQSATLIPVKVLDNSGSGSLYGITQGILYAADIDADVINMSLGGGGYNISMDEAVQTAVAQGTIVVAATGNDGASSISYPAAYSSVIAVGSVTSNRTRSSFSNYGSGLEVMAPGSNIYSTYPNSRYTSLSGTSMATPHVAGVAGLIRAANPDISVAQARQILRDTAQEAGSFTQYGYGIVDAHAAVVAASGGSGG

SEQ ID NO: 783 - DNA, 1239 bp, synthetic construct
  misc_feature 1..1239: note = Variant of serine peptidase from Bacillus sinesaloumensis
  source 1..1239: mol_type = other DNA
atggcagatcaagctagtcaagctaatggaaaccaggacgtcattgaaggcgagctgatcgtttcagtggaaccgaagaacggtaaacctgatgtgagcattcaaagtgcacaatccgtaacagggcaggaagacgtccttaaatcgaaaggctttacgatcgttgataccttgcatgtagaggatagcagcgtcaagccactcgtctcgaagaatttcaataagaaagtggtggagaagatgggactggtgtatcttgttcaatactctccggaccagtttaaaagttccaacattgcgaagaaagaactcagaaaagaattgatggatctgggctttaaagtccgctatataagcgaaaattacaagatgatggcgatcgaaggtacagccactcttcaggcggtgcaccctaaccaacaatggcattataatatgattaaagctccggaagcgtgggctattacgtctggatcctctagcgttaaagtagcagtcctggatacagggatcgaccataatcacccatccttggccaacttcgtgaatactaatcttggcatgtcgtttgttggaggaaacaccatggatgttcaaggtcatggcacacatgttgctggcacgattgcatcttatgggagtgtaagcggagtgatgcagagtgcgacactgatcccggtcaaagtgctcgataattctggcagcgggtccctttacggtattacgcaaggcatattgtatgccgccgacatcgatgcggacgtcattaacatgtctctgggtggaggaggctataatcagagcatggatgaggctgttcaaacagcagttgctcagggaaccattgtagtagcagcgactggcaatgatggtgcatcgtcgatcagttatcctgctgcctacagcagcgtcattgcggtgggatctgtggactccaatcgtacccgatcctcgttttctaactatggatctgggcttgaagttatggcaccgggcagcaacatctacagtacgtatcctaattccagatatacatctttgagtggtacaagcatggctactccgcacgttgcgggcgtagctgggctcattcgcgcagccaacccagacatagtggtcgcgcaagcccgtcagattctgcgggataccgcgcaagaagcaggatcgttcacacagtacggctatggaatcgtcgatgctcatgccgccgttgttgctgcatccggtggtagcggcggc

SEQ ID NO: 784 - protein, 413 aa, synthetic construct
  REGION 1..413: note = Variant of serine peptidase from Bacillus sinesaloumensis
MADQASQANGNQDVIEGELIVSVEPKNGKPDVSIQSAQSVTGQEDVLKSKGFTIVDTLHVEDSSVKPLVSKNFNKKVVEKMGLVYLVQYSPDQFKSSNIAKKELRKELMDLGFKVRYISENYKMMAIEGTATLQAVHPNQQWHYNMIKAPEAWAITSGSSSVKVAVLDTGIDHNHPSLANFVNTNLGMSFVGGNTMDVQGHGTHVAGTIASYGSVSGVMQSATLIPVKVLDNSGSGSLYGITQGILYAADIDADVINMSLGGGGYNQSMDEAVQTAVAQGTIVVAATGNDGASSISYPAAYSSVIAVGSVDSNRTRSSFSNYGSGLEVMAPGSNIYSTYPNSRYTSLSGTSMATPHVAGVAGLIRAANPDIVVAQARQILRDTAQEAGSFTQYGYGIVDAHAAVVAASGGSGG

SEQ ID NO: 785 - DNA, 1239 bp, synthetic construct
  misc_feature 1..1239: note = Variant of serine peptidase from Bacillus sinesaloumensis
  source 1..1239: mol_type = other DNA
atggcagatcaagctagtcaagctaatggaaaccaggacgtcattgaaggcgagctgatcgtttcagtggaaccgaagaacggtaaacctgatgtgagcattcaaagtgcacaatccgtaacagggcaggaagacgtccttaaatcgaaaggctttacgatcgttgataccttgcatgtagaggatagcagcgtcaagccactcgtctcgaagaatttcaataagaaagtggtggagaagatgggactggtgtatcttgttcaatactctccggaccagtttaaaagttccaacattgcgaagaaagaactcagaaaagaattgatggatctgggctttaaagtccgctatataagcgaaaattacaagatgatggcgatcgaaggtacagccactcttcaggcggtgcaccctaaccaaaactggcattataatatgattaaagctccggaagcgtgggctattacgtctggatccctgagcgttaaagtagcagtcctggatacagggatcgaccataatcacccatccttggccaacttcgtgaatactgaacttggcatgtcgtttgttggaggaaacaccatggatgttcaaggtcatggcacacatgttgctggcacgattgcatcttatgggagtgtaagcggagtgatgcagagtgcgacactgatcccggtcaaagtgctcgataattctggcagcgggtccctttacggtattacgcaaggcatattgtatgccgccgacatcgatgcggacgtcattaacatgtctctgggtggaggaggctataatcagagcatggatgaggctgttcaaacagcagttgctatgggaaccattgtagtagcagcgactggcaatgatggtgcatcgtcgatcagttatcctgctgcctacagcagcgtcattgcggtgggatctgtggactccaatcgtacccgatcctcgttttctaactatggatctgggcttgaagttatggcaccgggcagcaacatctacagtacgtatcctaattccagatatacatctttgagtggtacaagcatggctactccgcacgttgcgggcgtagctgggctcattcgcgcagccaacccagacataagtgtcgcgcaagcccgtcagattctgcgggataccgcgcaagaagcaggatcgttcacacagtacggctatggaatcgtcgatgctcatgccgccgttgttgctgcatccggtggtagcggcggc

SEQ ID NO: 786 - protein, 413 aa, synthetic construct
  REGION 1..413: note = Variant of serine peptidase from Bacillus sinesaloumensis
MADQASQANGNQDVIEGELIVSVEPKNGKPDVSIQSAQSVTGQEDVLKSKGFTIVDTLHVEDSSVKPLVSKNFNKKVVEKMGLVYLVQYSPDQFKSSNIAKKELRKELMDLGFKVRYISENYKMMAIEGTATLQAVHPNQNWHYNMIKAPEAWAITSGSLSVKVAVLDTGIDHNHPSLANFVNTELGMSFVGGNTMDVQGHGTHVAGTIASYGSVSGVMQSATLIPVKVLDNSGSGSLYGITQGILYAADIDADVINMSLGGGGYNQSMDEAVQTAVAMGTIVVAATGNDGASSISYPAAYSSVIAVGSVDSNRTRSSFSNYGSGLEVMAPGSNIYSTYPNSRYTSLSGTSMATPHVAGVAGLIRAANPDISVAQARQILRDTAQEAGSFTQYGYGIVDAHAAVVAASGGSGG

SEQ ID NO: 787 - DNA, 1239 bp, synthetic construct
  misc_feature 1..1239: note = Variant of serine peptidase from Bacillus sinesaloumensis
  source 1..1239: mol_type = other DNA
atggcagatcaagctagtcaagctaatggaaaccaggacgtcattgaaggcgagctgatcgtttcagtggaaccgaagaacggtaaacctgatgtgagcattcaaagtgcacaatccgtaacagggcaggaagacgtccttaaatcgaaaggctttacgatcgttgataccttgcatgtagaggatagcagcgtcaagccactcgtctcgaagaatttcaataagaaagtggtggagaagatgggactggtgtatcttgttcaatactctccggaccagtttaaaagttccaacattgcgaagaaagaactcagaaaagaattgatggatctgggctttaaagtccgctatataagcgaaaattacaagatgatggcgatcgaaggtacagccactcttcaggcgatgcaccctaaccaagtttggcattataatatgattaaagctccggaagcgtgggctattacgtctggatcctctagcgttaaagtagcagtcctggatacagggatcgaccataatcacccatccttggccaacttcgtgaatactaatcttggccgctcgtttgttggaggaaacaccatggatgttcaaggtcatggcacacatgttgctggcacgattgcatcttatgggagtgtaagcggagtgatgcagagtgcgacactgatcccggtcaaagtgctcgataattctggcagcgggtccctttacggtattacgcaaggcatattgtatgccgccgacatcgatgcggacgtcattaacatgtctctgggtggaggaggctataatcagagcatggatgaggctgttcaaacagcagttgctatgggaaccattgtagtagcagcgactggcaatgatggtgcatcgtcgatcagttatcctgctgcctacagcagcgtcattgcggtgggatctgtgacttccaatcgtacccgatcctcgttttctaactatggatctgggcttgaagttatggcaccgggcagcaacatctacagtacgtatcctaattccagatatacatctttgagtggtacaagcatggctactccgcacgttgcgggcgtagctgggctcattcgcgcagccaacccagacataagtgtcgcgcaagcccgtcagattctgcgggataccgcgcaagaagcaggatcgttcacacagtacggctatggaatcgtcgatgctcatgccgccgttgttgctgcatccggtggtagcggcggc

SEQ ID NO: 788 - protein, 413 aa, synthetic construct
  REGION 1..413: note = Variant of serine peptidase from Bacillus sinesaloumensis
MADQASQANGNQDVIEGELIVSVEPKNGKPDVSIQSAQSVTGQEDVLKSKGFTIVDTLHVEDSSVKPLVSKNFNKKVVEKMGLVYLVQYSPDQFKSSNIAKKELRKELMDLGFKVRYISENYKMMAIEGTATLQAMHPNQVWHYNMIKAPEAWAITSGSSSVKVAVLDTGIDHNHPSLANFVNTNLGRSFVGGNTMDVQGHGTHVAGTIASYGSVSGVMQSATLIPVKVLDNSGSGSLYGITQGILYAADIDADVINMSLGGGGYNQSMDEAVQTAVAMGTIVVAATGNDGASSISYPAAYSSVIAVGSVTSNRTRSSFSNYGSGLEVMAPGSNIYSTYPNSRYTSLSGTSMATPHVAGVAGLIRAANPDISVAQARQILRDTAQEAGSFTQYGYGIVDAHAAVVAASGGSGG

SEQ ID NO: 789 - DNA, 1239 bp, synthetic construct
  misc_feature 1..1239: note = Variant of serine peptidase from Bacillus sinesaloumensis
  source 1..1239: mol_type = other DNA
atggcagatcaagctagtcaagctaatggaaaccaggacgtcattgaaggcgagctgatcgtttcagtggaaccgaagaacggtaaacctgatgtgagcattcaaagtgcacaatccgtaacagggcaggaagacgtccttaaatcgaaaggctttacgatcgttgataccttgcatgtagaggatagcagcgtcaagccactcgtctcgaagaatttcaataagaaagtggtggagaagatgggactggtgtatcttgttcaatactctccggaccagtttaaaagttccaacattgcgaagaaagaactcagaaaagaattgatggatctgggctttaaagtccgctatataagcgaaaattacaagatgatggcgatcgaaggtacagccactcttcaggggatgcaccctaaccaagtttggcattataatatgattaaagctccggaagcgtgggctattacgtctggatccctgagcgttaaagtagcagtcctggatacagggatcgaccataatcacccatccttggccaacttcgtgaatactgaacttggcctgtcgtttgttggaggaaacaccatggatgttcaaggtcatggcacacatgttgctggcacgattgcatcttatgggagtgtaagcggagtgatgcagagtgcgacactgatcccggtcaaagtgctcgataattctggcagcgggtccctttacggtattacgcaaggcatattgtatgccgccgacatcgatgcggacgtcattaacatgtctctgggtggaggaggctataatcagagcatggatgaggctgttcaaacagcagttgctcagggaaccattgtagtagcagcgactggcaatgatggtgcatcgtcgatcagttatcctgctgcctacagcagcgtcattgcggtgggatctgtgacttccaatcgtacccgatcctcgttttctaactatggatctgggcttgaagttatggcaccgggcagcaacatctacagtacgtatcctaattccagatatacatctttgagtggtacaagcatggctactccgcacgttgcgggcgtagctgggctcattcgcgcagccaacccagacatatctgtcgcgcaagcccgtcagattctgcgggataccgcgcaagaagcaggatcgttcacacagtacggctatggaatcgtcgatgctcatgccgccgttgttgctgcatccggtggtagcggcggc

SEQ ID NO: 790 - protein, 413 aa, synthetic construct
  REGION 1..413: note = Variant of serine peptidase from Bacillus sinesaloumensis
MADQASQANGNQDVIEGELIVSVEPKNGKPDVSIQSAQSVTGQEDVLKSKGFTIVDTLHVEDSSVKPLVSKNFNKKVVEKMGLVYLVQYSPDQFKSSNIAKKELRKELMDLGFKVRYISENYKMMAIEGTATLQGMHPNQVWHYNMIKAPEAWAITSGSLSVKVAVLDTGIDHNHPSLANFVNTELGLSFVGGNTMDVQGHGTHVAGTIASYGSVSGVMQSATLIPVKVLDNSGSGSLYGITQGILYAADIDADVINMSLGGGGYNQSMDEAVQTAVAQGTIVVAATGNDGASSISYPAAYSSVIAVGSVTSNRTRSSFSNYGSGLEVMAPGSNIYSTYPNSRYTSLSGTSMATPHVAGVAGLIRAANPDISVAQARQILRDTAQEAGSFTQYGYGIVDAHAAVVAASGGSGG

SEQ ID NO: 791 - DNA, 1239 bp, synthetic construct
  misc_feature 1..1239: note = Variant of serine peptidase from Bacillus sinesaloumensis
  source 1..1239: mol_type = other DNA
atggcagatcaagctagtcaagctaatggaaaccaggacgtcattgaaggcgagctgatcgtttcagtggaaccgaagaacggtaaacctgatgtgagcattcaaagtgcacaatccgtaacagggcaggaagacgtccttaaatcgaaaggctttacgatcgttgataccttgcatgtagaggatagcagcgtcaagccactcgtctcgaagaatttcaataagaaagtggtggagaagatgggactggtgtatcttgttcaatactctccggaccagtttaaaagttccaacattgcgaagaaagaactcagaaaagaattgatggatctgggctttaaagtccgctatataagcgaaaattacaagatgatggcgatcgaaggtacagccactcttcaggcggtgcaccctaaccaacaatggcattataatatgattaaagctccggaagcgtgggctattacgtctggatcctcgagcgttaaagtagcagtcctggatacagggatcgaccataatcacccatccttggccaacttcgtgaatactaatcttggccggtcgtttgttggaggaaacaccatggatgttcaaggtcatggcacacatgttgctggcacgattgcatcttatgggagtgtaagcggagtgatgcagagtgcgacactgatcccggtcaaagtgctcgataattctggcagcgggtccctttacggtattacgcaaggcatattgtatgccgccgacatcgatgcggacgtcattaacatgtctctgggtggaggaggctataatcagagcatggatgaggctgttcaaacagcagttgctcagggaaccattgtagtagcagcgactggcaatgatggtgcatcgtcgatcagttatcctgctgcctacagcagcgtcattgcggtgggatctgtgacgtccaatcgtacacgatcctcgttttctaactatggatctgggcttgaagttatggcaccgggcagcaacatctacagtacgtatcctaattccagatatacatctttgagtggtacaagcatggctactccgcacgttgcgggcgtagctgggctcattcgcgcagccaacccagacatagtggtcgcgcaagcccgtcagattctgcgggataccgcgcaagaagcaggatcgttcacacagtacggctatggaatcgtcgatgctcatgccgccgttgttgctgcatccggtggtagcggcggc

SEQ ID NO: 792 - protein, 413 aa, synthetic construct
  REGION 1..413: note = Variant of serine peptidase from Bacillus sinesaloumensis
MADQASQANGNQDVIEGELIVSVEPKNGKPDVSIQSAQSVTGQEDVLKSKGFTIVDTLHVEDSSVKPLVSKNFNKKVVEKMGLVYLVQYSPDQFKSSNIAKKELRKELMDLGFKVRYISENYKMMAIEGTATLQAVHPNQQWHYNMIKAPEAWAITSGSSSVKVAVLDTGIDHNHPSLANFVNTNLGRSFVGGNTMDVQGHGTHVAGTIASYGSVSGVMQSATLIPVKVLDNSGSGSLYGITQGILYAADIDADVINMSLGGGGYNQSMDEAVQTAVAQGTIVVAATGNDGASSISYPAAYSSVIAVGSVTSNRTRSSFSNYGSGLEVMAPGSNIYSTYPNSRYTSLSGTSMATPHVAGVAGLIRAANPDIVVAQARQILRDTAQEAGSFTQYGYGIVDAHAAVVAASGGSGG

SEQ ID NO: 793 - DNA, 1239 bp, synthetic construct
  misc_feature 1..1239: note = Variant of serine peptidase from Bacillus sinesaloumensis
  source 1..1239: mol_type = other DNA
atggcagatcaagctagtcaagctaatggaaaccaggacgtcattgaaggcgagctgatcgtttcagtggaaccgaagaacggtaaacctgatgtgagcattcaaagtgcacaatccgtaacagggcaggaagacgtccttaaatcgaaaggctttacgatcgttgataccttgcatgtagaggatagcagcgtcaagccactcgtctcgaagaatttcaataagaaagtggtggagaagatgggactggtgtatcttgttcaatactctccggaccagtttaaaagttccaacattgcgaagaaagaactcagaaaagaattgatggatctgggctttaaagtccgctatataagcgaaaattacaagatgatggcgatcgaaggtacagccactcttcaggagatgcaccctaaccaacaatggcattataatatgattaaagctccggaagcgtgggctattacgtctggatcctcgagcgttaaagtagcagtcctggatacagggatcgaccataatcacccatccttggccaacttcgtgaatactaatcttggccggtcgtttgttggaggaaacaccatggatgttcaaggtcatggcacacatgttgctggcacgattgcatcttatgggagtgtaagcggagtgatgcagagtgcgacactgatcccggtcaaagtgctcgataattctggcagcgggtccctttacggtattacgcaaggcatattgtatgccgccgacatcgatgcggacgtcattaacatgtctctgggtggaggaggctataatcagagcatggatgaggctgttcaaacagcagttgctcagggaaccattgtagtagcagcgactggcaatgatggtgcatcgtcgatcagttatcctgctgcctacagcagcgtcattgcggtgggatctgtggactccaatcgtacccgatcctcgttttctaactatggatctgggcttgaagttatggcaccgggcagcaacatctacagtacgtatcctaattccagatatacatctttgagtggtacaagcatggctactccgcacgttgcgggcgtagctgggctcattcgcgcagccaacccagacatatctgtcgcgcaagcccgtcagattctgcgggataccgcgcaagaagcaggatcgttcacacagtacggctatggaatcgtcgatgctcatgccgccgttgttgctgcatccggtggtagcggcggc

SEQ ID NO: 794 - protein, 413 aa, synthetic construct
  REGION 1..413: note = Variant of serine peptidase from Bacillus sinesaloumensis
MADQASQANGNQDVIEGELIVSVEPKNGKPDVSIQSAQSVTGQEDVLKSKGFTIVDTLHVEDSSVKPLVSKNFNKKVVEKMGLVYLVQYSPDQFKSSNIAKKELRKELMDLGFKVRYISENYKMMAIEGTATLQEMHPNQQWHYNMIKAPEAWAITSGSSSVKVAVLDTGIDHNHPSLANFVNTNLGRSFVGGNTMDVQGHGTHVAGTIASYGSVSGVMQSATLIPVKVLDNSGSGSLYGITQGILYAADIDADVINMSLGGGGYNQSMDEAVQTAVAQGTIVVAATGNDGASSISYPAAYSSVIAVGSVDSNRTRSSFSNYGSGLEVMAPGSNIYSTYPNSRYTSLSGTSMATPHVAGVAGLIRAANPDISVAQARQILRDTAQEAGSFTQYGYGIVDAHAAVVAASGGSGG

SEQ ID NO: 795 - DNA, 1239 bp, synthetic construct
  misc_feature 1..1239: note = Variant of serine peptidase from Bacillus sinesaloumensis
  source 1..1239: mol_type = other DNA
atggcagatcaagctagtcaagctaatggaaaccaggacgtcattgaaggcgagctgatcgtttcagtggaaccgaagaacggtaaacctgatgtgagcattcaaagtgcacaatccgtaacagggcaggaagacgtccttaaatcgaaaggctttacgatcgttgataccttgcatgtagaggatagcagcgtcaagccactcgtctcgaagaatttcaataagaaagtggtggagaagatgggactggtgtatcttgttcaatactctccggaccagtttaaaagttccaacattgcgaagaaagaactcagaaaagaattgatggatctgggctttaaagtccgctatataagcgaaaattacaagatgatggcgatcgaaggtacagccactcttcaggcggtgcaccctaaccaaaactggcattataatatgattaaagctccggaagcgtgggctattacgtctggatcctctagcgttaaagtagcagtcctggatacagggatcgaccataatcacccatccttggccaacttcgtgaatactgaacttggccgctcgtttgttggaggaaacaccatggatgttcaaggtcatggcacacatgttgctggcacgattgcatcttatgggagtgtaagcggagtgatgcagagtgcgacactgatcccggtcaaagtgctcgataattctggcagcgggtccctttacggtattacgcaaggcatattgtatgccgccgacatcgatgcggacgtcattaacatgtctctgggtggaggaggctataatcagagcatggatgaggctgttcaaacagcagttgctcagggaaccattgtagtagcagcgactggcaatgatggtgcatcgtcgatcagttatcctgctgcctacagcagcgtcattgcggtgggatctgtggactccaatcgtgttcgatcctcgttttctaactatggatctgggcttgaagttatggcaccgggcagcaacatctacagtacgtatcctaattccagatatacatctttgagtggtacaagcatggctactccgcacgttgcgggcgtagctgggctcattcgcgcagccaacccagacatagtggtcgcgcaagcccgtcagattctgcgggataccgcgcaagaagcaggatcgttcacacagtacggctatggaatcgtcgatgctcatgccgccgttgttgctgcatccggtggtagcggcggc

SEQ ID NO: 796 - protein, 413 aa, synthetic construct
  REGION 1..413: note = Variant of serine peptidase from Bacillus sinesaloumensis
MADQASQANGNQDVIEGELIVSVEPKNGKPDVSIQSAQSVTGQEDVLKSKGFTIVDTLHVEDSSVKPLVSKNFNKKVVEKMGLVYLVQYSPDQFKSSNIAKKELRKELMDLGFKVRYISENYKMMAIEGTATLQAVHPNQNWHYNMIKAPEAWAITSGSSSVKVAVLDTGIDHNHPSLANFVNTELGRSFVGGNTMDVQGHGTHVAGTIASYGSVSGVMQSATLIPVKVLDNSGSGSLYGITQGILYAADIDADVINMSLGGGGYNQSMDEAVQTAVAQGTIVVAATGNDGASSISYPAAYSSVIAVGSVDSNRVRSSFSNYGSGLEVMAPGSNIYSTYPNSRYTSLSGTSMATPHVAGVAGLIRAANPDIVVAQARQILRDTAQEAGSFTQYGYGIVDAHAAVVAASGGSGG

SEQ ID NO: 797 - DNA, 1239 bp, synthetic construct
  misc_feature 1..1239: note = Variant of serine peptidase from Bacillus sinesaloumensis
  source 1..1239: mol_type = other DNA
atggcagatcaagctagtcaagctaatggaaaccaggacgtcattgaaggcgagctgatcgtttcagtggaaccgaagaacggtaaacctgatgtgagcattcaaagtgcacaatccgtaacagggcaggaagacgtccttaaatcgaaaggctttacgatcgttgataccttgcatgtagaggatagcagcgtcaagccactcgtctcgaagaatttcaataagaaagtggtggagaagatgggactggtgtatcttgttcaatactctccggaccagtttaaaagttccaacattgcgaagaaagaactcagaaaagaattgatggatctgggctttaaagtccgctatataagcgaaaattacaagatgatggcgatcgaaggtacagccactcttcagggggtgcaccctaaccaagtttggcattataatatgattaaagctccggaagcgtgggctattacgtctggatcctcgagcgttaaagtagcagtcctggatacagggatcgaccataatcacccatccttggccaacttcgtgaatactaatcttggcatgtcgtttgttggaggaaacaccatggatgttcaaggtcatggcacacatgttgctggcacgattgcatcttatgggagtgtaagcggagtgatgcagagtgcgacactgatcccggtcaaagtgctcgataattctggcagcgggtccctttacggtattacgcaaggcatattgtatgccgccgacatcgatgcggacgtcattaacatgtctctgggtggaggaggctataatcagagcatggatgaggctgttcaaacagcagttgctcagggaaccattgtagtagcagcgactggcaatgatggtgcatcgtcgatcagttatcctgctgcctacagcagcgtcattgcggtgggatctgtgacttccaatcgtacccgatcctcgttttctaactatggatctgggcttgaagttatggcaccgggcagcaacatctacagtacgtatcctaattccagatatacatctttgagtggtacaagcatggctactccgcacgttgcgggcgtagctgggctcattcgcgcagccaacccagacataagtgtcgcgcaagcccgtcagattctgcgggataccgcgcaagaagcaggatcgttcacacagtacggctatggaatcgtcgatgctcatgccgccgttgttgctgcatccggtggtagcggcggc

SEQ ID NO: 798 - protein, 413 aa, synthetic construct
  REGION 1..413: note = Variant of serine peptidase from Bacillus sinesaloumensis
MADQASQANGNQDVIEGELIVSVEPKNGKPDVSIQSAQSVTGQEDVLKSKGFTIVDTLHVEDSSVKPLVSKNFNKKVVEKMGLVYLVQYSPDQFKSSNIAKKELRKELMDLGFKVRYISENYKMMAIEGTATLQGVHPNQVWHYNMIKAPEAWAITSGSSSVKVAVLDTGIDHNHPSLANFVNTNLGMSFVGGNTMDVQGHGTHVAGTIASYGSVSGVMQSATLIPVKVLDNSGSGSLYGITQGILYAADIDADVINMSLGGGGYNQSMDEAVQTAVAQGTIVVAATGNDGASSISYPAAYSSVIAVGSVTSNRTRSSFSNYGSGLEVMAPGSNIYSTYPNSRYTSLSGTSMATPHVAGVAGLIRAANPDISVAQARQILRDTAQEAGSFTQYGYGIVDAHAAVVAASGGSGG

SEQ ID NO: 799 - DNA, 1239 bp, synthetic construct
  misc_feature 1..1239: note = Variant of serine peptidase from Bacillus sinesaloumensis
  source 1..1239: mol_type = other DNA
atggcagatcaagctagtcaagctaatggaaaccaggacgtcattgaaggcgagctgatcgtttcagtggaaccgaagaacggtaaacctgatgtgagcattcaaagtgcacaatccgtaacagggcaggaagacgtccttaaatcgaaaggctttacgatcgttgataccttgcatgtagaggatagcagcgtcaagccactcgtctcgaagaatttcaataagaaagtggtggagaagatgggactggtgtatcttgttcaatactctccggaccagtttaaaagttccaacattgcgaagaaagaactcagaaaagaattgatggatctgggctttaaagtccgctatataagcgaaaattacaagatgatggcgatcgaaggtacagccactcttcaggcgatgcaccctaaccaaaactggcattataatatgattaaagctccggaagcgtgggctattacgtctggatcctcgagcgttaaagtagcagtcctggatacagggatcgaccataatcacccatccttggccaacttcgtgaatactgaacttggccgctcgtttgttggaggaaacaccatggatgttcaaggtcatggcacacatgttgctggcacgattgcatcttatgggagtgtaagcggagtgatgcagagtgcgacactgatcccggtcaaagtgctcgataattctggcagcgggtccctttacggtattacgcaaggcatattgtatgccgccgacatcgatgcggacgtcattaacatgtctctgggtggaggaggctataatcagagcatggatgaggctgttcaaacagcagttgctcagggaaccattgtagtagcagcgactggcaatgatggtgcatcgtcgatcagttatcctgctgcctacagcagcgtcattgcggtgggatctgtgacgtccaatcgtacacgatcctcgttttctaactatggatctgggcttgaagttatggcaccgggcagcaacatctacagtacgtatcctaattccagatatacatctttgagtggtacaagcatggctactccgcacgttgcgggcgtagctgggctcattcgcgcagccaacccagacataagtgtcgcgcaagcccgtcagattctgcgggataccgcgcaagaagcaggatcgttcacacagtacggctatggaatcgtcgatgctcatgccgccgttgttgctgcatccggtggtagcggcggc

SEQ ID NO: 800 - protein, 413 aa, synthetic construct
  REGION 1..413: note = Variant of serine peptidase from Bacillus sinesaloumensis
MADQASQANGNQDVIEGELIVSVEPKNGKPDVSIQSAQSVTGQEDVLKSKGFTIVDTLHVEDSSVKPLVSKNFNKKVVEKMGLVYLVQYSPDQFKSSNIAKKELRKELMDLGFKVRYISENYKMMAIEGTATLQAMHPNQNWHYNMIKAPEAWAITSGSSSVKVAVLDTGIDHNHPSLANFVNTELGRSFVGGNTMDVQGHGTHVAGTIASYGSVSGVMQSATLIPVKVLDNSGSGSLYGITQGILYAADIDADVINMSLGGGGYNQSMDEAVQTAVAQGTIVVAATGNDGASSISYPAAYSSVIAVGSVTSNRTRSSFSNYGSGLEVMAPGSNIYSTYPNSRYTSLSGTSMATPHVAGVAGLIRAANPDISVAQARQILRDTAQEAGSFTQYGYGIVDAHAAVVAASGGSGG

SEQ ID NO: 801 - DNA, 1239 bp, synthetic construct
  misc_feature 1..1239: note = Variant of serine peptidase from Bacillus sinesaloumensis
  source 1..1239: mol_type = other DNA
atggcagatcaagctagtcaagctaatggaaaccaggacgtcattgaaggcgagctgatcgtttcagtggaaccgaagaacggtaaacctgatgtgagcattcaaagtgcacaatccgtaacagggcaggaagacgtccttaaatcgaaaggctttacgatcgttgataccttgcatgtagaggatagcagcgtcaagccactcgtctcgaagaatttcaataagaaagtggtggagaagatgggactggtgtatcttgttcaatactctccggaccagtttaaaagttccaacattgcgaagaaagaactcagaaaagaattgatggatctgggctttaaagtccgctatataagcgaaaattacaagatgatggcgatcgaaggtacagccactcttcaggaggtgcaccctaaccaacaatggcattataatatgattaaagctccggaagcgtgggctattacgtctggatcctcgagcgttaaagtagcagtcctggatacagggatcgaccataatcacccatccttggccaacttcgtgaatactaatcttggccgctcgtttgttggaggaaacaccatggatgttcaaggtcatggcacacatgttgctggcacgattgcatcttatgggagtgtaagcggagtgatgcagagtgcgacactgatcccggtcaaagtgctcgataattctggcagcgggtccctttacggtattacgcaaggcatattgtatgccgccgacatcgatgcggacgtcattaacatgtctctgggtggaggaggctataatcagagcatggatgaggctgttcaaacagcagttgctcagggaaccattgtagtagcagcgactggcaatgatggtgcatcgtcgatcagttatcctgctgcctacagcagcgtcattgcggtgggatctgtgacttccaatcgtacccgatcctcgttttctaactatggatctgggcttgaagttatggcaccgggcagcaacatctacagtacgtatcctaattccagatatacatctttgagtggtacaagcatggctactccgcacgttgcgggcgtagctgggctcattcgcgcagccaacccagacatatctgtcgcgcaagcccgtcagattctgcgggataccgcgcaagaagcaggatcgttcacacagtacggctatggaatcgtcgatgctcatgccgccgttgttgctgcatccggtggtagcggcggc

SEQ ID NO: 802 - protein, 413 aa, synthetic construct
  REGION 1..413: note = Variant of serine peptidase from Bacillus sinesaloumensis
MADQASQANGNQDVIEGELIVSVEPKNGKPDVSIQSAQSVTGQEDVLKSKGFTIVDTLHVEDSSVKPLVSKNFNKKVVEKMGLVYLVQYSPDQFKSSNIAKKELRKELMDLGFKVRYISENYKMMAIEGTATLQEVHPNQQWHYNMIKAPEAWAITSGSSSVKVAVLDTGIDHNHPSLANFVNTNLGRSFVGGNTMDVQGHGTHVAGTIASYGSVSGVMQSATLIPVKVLDNSGSGSLYGITQGILYAADIDADVINMSLGGGGYNQSMDEAVQTAVAQGTIVVAATGNDGASSISYPAAYSSVIAVGSVTSNRTRSSFSNYGSGLEVMAPGSNIYSTYPNSRYTSLSGTSMATPHVAGVAGLIRAANPDISVAQARQILRDTAQEAGSFTQYGYGIVDAHAAVVAASGGSGG

SEQ ID NO: 803 - DNA, 1239 bp, synthetic construct
  misc_feature 1..1239: note = Variant of serine peptidase from Bacillus sinesaloumensis
  source 1..1239: mol_type = other DNA
atggcagatcaagctagtcaagctaatggaaaccaggacgtcattgaaggcgagctgatcgtttcagtggaaccgaagaacggtaaacctgatgtgagcattcaaagtgcacaatccgtaacagggcaggaagacgtccttaaatcgaaaggctttacgatcgttgataccttgcatgtagaggatagcagcgtcaagccactcgtctcgaagaatttcaataagaaagtggtggagaagatgggactggtgtatcttgttcaatactctccggaccagtttaaaagttccaacattgcgaagaaagaactcagaaaagaattgatggatctgggctttaaagtccgctatataagcgaaaattacaagatgatggcgatcgaaggtacagccactcttcaggagatgcaccctaaccaacaatggcattataatatgattaaagctccggaagcgtgggctattacgtctggatcctcgagcgttaaagtagcagtcctggatacagggatcgaccataatcacccatccttggccaacttcgtgaatactaatcttggccgctcgtttgttggaggaaacaccatggatgttcaaggtcatggcacacatgttgctggcacgattgcatcttatgggagtgtaagcggagtgatgcagagtgcgacactgatcccggtcaaagtgctcgataattctggcagcgggtccctttacggtattacgcaaggcatattgtatgccgccgacatcgatgcggacgtcattaacatgtctctgggtggaggaggctataatcagagcatggatgaggctgttcaaacagcagttgctatgggaaccattgtagtagcagcgactggcaatgatggtgcatcgtcgatcagttatcctgctgcctacagcagcgtcattgcggtgggatctgtgacttccaatcgtgttcgatcctcgttttctaactatggatctgggcttgaagttatggcaccgggcagcaacatctacagtacgtatcctaattccagatatacatctttgagtggtacaagcatggctactccgcacgttgcgggcgtagctgggctcattcgcgcagccaacccagacatactggtcgcgcaagcccgtcagattctgcgggataccgcgcaagaagcaggatcgttcacacagtacggctatggaatcgtcgatgctcatgccgccgttgttgctgcatccggtggtagcggcggc

SEQ ID NO: 804 - protein, 413 aa, synthetic construct
  REGION 1..413: note = Variant of serine peptidase from Bacillus sinesaloumensis
MADQASQANGNQDVIEGELIVSVEPKNGKPDVSIQSAQSVTGQEDVLKSKGFTIVDTLHVEDSSVKPLVSKNFNKKVVEKMGLVYLVQYSPDQFKSSNIAKKELRKELMDLGFKVRYISENYKMMAIEGTATLQEMHPNQQWHYNMIKAPEAWAITSGSSSVKVAVLDTGIDHNHPSLANFVNTNLGRSFVGGNTMDVQGHGTHVAGTIASYGSVSGVMQSATLIPVKVLDNSGSGSLYGITQGILYAADIDADVINMSLGGGGYNQSMDEAVQTAVAMGTIVVAATGNDGASSISYPAAYSSVIAVGSVTSNRVRSSFSNYGSGLEVMAPGSNIYSTYPNSRYTSLSGTSMATPHVAGVAGLIRAANPDILVAQARQILRDTAQEAGSFTQYGYGIVDAHAAVVAASGGSGG

SEQ ID NO: 805 - DNA, 1239 bp, synthetic construct
  misc_feature 1..1239: note = Variant of serine peptidase from Bacillus sinesaloumensis
  source 1..1239: mol_type = other DNA
atggcagatcaagctagtcaagctaatggaaaccaggacgtcattgaaggcgagctgatcgtttcagtggaaccgaagaacggtaaacctgatgtgagcattcaaagtgcacaatccgtaacagggcaggaagacgtccttaaatcgaaaggctttacgatcgttgataccttgcatgtagaggatagcagcgtcaagccactcgtctcgaagaatttcaataagaaagtggtggagaagatgggactggtgtatcttgttcaatactctccggaccagtttaaaagttccaacattgcgaagaaagaactcagaaaagaattgatggatctgggctttaaagtccgctatataagcgaaaattacaagatgatggcgatcgaaggtacagccactcttcagggggtgcaccctaaccaaaactggcattataatatgattaaagctccggaagcgtgggctattacgtctggatcctctagcgttaaagtagcagtcctggatacagggatcgaccataatcacccatccttggccaacttcgtgaatactaatcttggccgctcgtttgttggaggaaacaccatggatgttcaaggtcatggcacacatgttgctggcacgattgcatcttatgggagtgtaagcggagtgatgcagagtgcgacactgatcccggtcaaagtgctcgataattctggcagcgggtccctttacggtattacgcaaggcatattgtatgccgccgacatcgatgcggacgtcattaacatgtctctgggtggaggaggctataatcagagcatggatgaggctgttcaaacagcagttgctcagggaaccattgtagtagcagcgactggcaatgatggtgcatcgtcgatcagttatcctgctgcctacagcagcgtcattgcggtgggatctgtggactccaatcgtgttcgatcctcgttttctaactatggatctgggcttgaagttatggcaccgggcagcaacatctacagtacgtatcctaattccagatatacatctttgagtggtacaagcatggctactccgcacgttgcgggcgtagctgggctcattcgcgcagccaacccagacataagtgtcgcgcaagcccgtcagattctgcgggataccgcgcaagaagcaggatcgttcacacagtacggctatggaatcgtcgatgctcatgccgccgttgttgctgcatccggtggtagcggcggc

SEQ ID NO: 806 - protein, 413 aa, synthetic construct
  REGION 1..413: note = Variant of serine peptidase from Bacillus sinesaloumensis
MADQASQANGNQDVIEGELIVSVEPKNGKPDVSIQSAQSVTGQEDVLKSKGFTIVDTLHVEDSSVKPLVSKNFNKKVVEKMGLVYLVQYSPDQFKSSNIAKKELRKELMDLGFKVRYISENYKMMAIEGTATLQGVHPNQNWHYNMIKAPEAWAITSGSSSVKVAVLDTGIDHNHPSLANFVNTNLGRSFVGGNTMDVQGHGTHVAGTIASYGSVSGVMQSATLIPVKVLDNSGSGSLYGITQGILYAADIDADVINMSLGGGGYNQSMDEAVQTAVAQGTIVVAATGNDGASSISYPAAYSSVIAVGSVDSNRVRSSFSNYGSGLEVMAPGSNIYSTYPNSRYTSLSGTSMATPHVAGVAGLIRAANPDISVAQARQILRDTAQEAGSFTQYGYGIVDAHAAVVAASGGSGG

SEQ ID NO: 807 - DNA, 1239 bp, synthetic construct
  misc_feature 1..1239: note = Variant of serine peptidase from Bacillus sinesaloumensis
  source 1..1239: mol_type = other DNA
atggcagatcaagctagtcaagctaatggaaaccaggacgtcattgaaggcgagctgatcgtttcagtggaaccgaagaacggtaaacctgatgtgagcattcaaagtgcacaatccgtaacagggcaggaagacgtccttaaatcgaaaggctttacgatcgttgataccttgcatgtagaggatagcagcgtcaagccactcgtctcgaagaatttcaataagaaagtggtggagaagatgggactggtgtatcttgttcaatactctccggaccagtttaaaagttccaacattgcgaagaaagaactcagaaaagaattgatggatctgggctttaaagtccgctatataagcgaaaattacaagatgatggcgatcgaaggtacagccactcttcaggcggtgcaccctaaccaagtttggcattataatatgattaaagctccggaagcgtgggctattacgtctggatcctctagcgttaaagtagcagtcctggatacagggatcgaccataatcacccatccttggccaacttcgtgaatactaatcttggccgctcgtttgttggaggaaacaccatggatgttcaaggtcatggcacacatgttgctggcacgattgcatcttatgggagtgtaagcggagtgatgcagagtgcgacactgatcccggtcaaagtgctcgataattctggcagcgggtccctttacggtattacgcaaggcatattgtatgccgccgacatcgatgcggacgtcattaacatgtctctgggtggaggaggctataatcagagcatggatgaggctgttcaaacagcagttgctcagggaaccattgtagtagcagcgactggcaatgatggtgcatcgtcgatcagttatcctgctgcctacagcagcgtcattgcggtgggatctgtgacgtccaatcgtacccgatcctcgttttctaactatggatctgggcttgaagttatggcaccgggcagcaacatctacagtacgtatcctaattccagatatacatctttgagtggtacaagcatggctactccgcacgttgcgggcgtagctgggctcattcgcgcagccaacccagacatatctgtcgcgcaagcccgtcagattctgcgggataccgcgcaagaagcaggatcgttcacacagtacggctatggaatcgtcgatgctcatgccgccgttgttgctgcatccggtggtagcggcggc

SEQ ID NO: 808 - protein, 413 aa, synthetic construct; identical to SEQ ID NO: 572
  REGION 1..413: note = Variant of serine peptidase from Bacillus sinesaloumensis

SEQ ID NO: 809 - DNA, 1239 bp, synthetic construct
  misc_feature 1..1239: note = Variant of serine peptidase from Bacillus sinesaloumensis
  source 1..1239: mol_type = other DNA
atggcagatcaagctagtcaagctaatggaaaccaggacgtcattgaaggcgagctgatcgtttcagtggaaccgaagaacggtaaacctgatgtgagcattcaaagtgcacaatccgtaacagggcaggaagacgtccttaaatcgaaaggctttacgatcgttgataccttgcatgtagaggatagcagcgtcaagccactcgtctcgaagaatttcaataagaaagtggtggagaagatgggactggtgtatcttgttcaatactctccggaccagtttaaaagttccaacattgcgaagaaagaactcagaaaagaattgatggatctgggctttaaagtccgctatataagcgaaaattacaagatgatggcgatcgaaggtacagccactcttcagggggtgcaccctaaccaagtttggcattataatatgattaaagctccggaagcgtgggctattacgtctggatcctctagcgttaaagtagcagtcctggatacagggatcgaccataatcacccatccttggccaacttcgtgaatactaatcttggccggtcgtttgttggaggaaacaccatggatgttcaaggtcatggcacacatgttgctggcacgattgcatcttatgggagtgtaagcggagtgatgcagagtgcgacactgatcccggtcaaagtgctcgataattctggcagcgggtccctttacggtattacgcaaggcatattgtatgccgccgacatcgatgcggacgtcattaacatgtctctgggtggaggaggctataatcagagcatggatgaggctgttcaaacagcagttgctcagggaaccattgtagtagcagcgactggcaatgatggtgcatcgtcgatcagttatcctgctgcctacagcagcgtcattgcggtgggatctgtgacgtccaatcgtacacgatcctcgttttctaactatggatctgggcttgaagttatggcaccgggcagcaacatctacagtacgtatcctaattccagatatacatctttgagtggtacaagcatggctactccgcacgttgcgggcgtagctgggctcattcgcgcagccaacccagacataagtgtcgcgcaagcccgtcagattctgcgggataccgcgcaagaagcaggatcgttcacacagtacggctatggaatcgtcgatgctcatgccgccgttgttgctgcatccggtggtagcggcggc

SEQ ID NO: 810 - protein, 413 aa, synthetic construct
  REGION 1..413: note = Variant of serine peptidase from Bacillus sinesaloumensis
MADQASQANGNQDVIEGELIVSVEPKNGKPDVSIQSAQSVTGQEDVLKSKGFTIVDTLHVEDSSVKPLVSKNFNKKVVEKMGLVYLVQYSPDQFKSSNIAKKELRKELMDLGFKVRYISENYKMMAIEGTATLQGVHPNQVWHYNMIKAPEAWAITSGSSSVKVAVLDTGIDHNHPSLANFVNTNLGRSFVGGNTMDVQGHGTHVAGTIASYGSVSGVMQSATLIPVKVLDNSGSGSLYGITQGILYAADIDADVINMSLGGGGYNQSMDEAVQTAVAQGTIVVAATGNDGASSISYPAAYSSVIAVGSVTSNRTRSSFSNYGSGLEVMAPGSNIYSTYPNSRYTSLSGTSMATPHVAGVAGLIRAANPDISVAQARQILRDTAQEAGSFTQYGYGIVDAHAAVVAASGGSGG

SEQ ID NO: 811 - DNA, 1239 bp, synthetic construct
  misc_feature 1..1239: note = Variant of serine peptidase from Bacillus sinesaloumensis
  source 1..1239: mol_type = other DNA
atggcagatcaagctagtcaagctaatggaaaccaggacgtcattgaaggcgagctgatcgtttcagtggaaccgaagaacggtaaacctgatgtgagcattcaaagtgcacaatccgtaacagggcaggaagacgtccttaaatcgaaaggctttacgatcgttgataccttgcatgtagaggatagcagcgtcaagccactcgtctcgaagaatttcaataagaaagtggtggagaagatgggactggtgtatcttgttcaatactctccggaccagtttaaaagttccaacattgcgaagaaagaactcagaaaagaattgatggatctgggctttaaagtccgctatataagcgaaaattacaagatgatggcgatcgaaggtacagccactcttcaggcagtacaccctaaccaaaactggcattataatatgattaaagctccggaagcgtgggctattacgtctggatcctcgagcgttaaagtagcagtcctggatacagggatcgaccataatcacccatccttggccaacttcgtgaatactaatcttggccggtcgtttgttggaggaaacaccatggatgttcaaggtcatggcacacatgttgctggcacgattgcatcttatgggagtgtaagcggagtgatgcagagtgcgacactgatcccggtcaaagtgctcgataattctggcagcgggtccctttacggtattacgcaaggcatattgtatgccgccgacatcgatgcggacgtcattaacatgtctctgggtggaggaggctataatcagagcatggatgaggctgttcaaacagcagttgctcagggaaccattgtagtagcagcgactggcaatgatggtgcatcgtcgatcagttatcctgctgcctacagcagcgtcattgcggtgggatctgtggactccaatcgtacccgatcctcgttttctaactatggatctgggcttgaagttatggcaccgggcagcaacatctacagtacgtatcctaattccagatatacatctttgagtggtacaagcatggctactccgcacgttgcgggcgtagctgggctcattcgcgcagccaacccagacatactggtcgcgcaagcccgtcagattctgcgggataccgcgcaagaagcaggatcgttcacacagtacggctatggaatcgtcgatgctcatgccgccgttgttgctgcatccggtggtagcggcggc

SEQ ID NO: 812 - protein, 413 aa, synthetic construct
  REGION 1..413: note = Variant of serine peptidase from Bacillus sinesaloumensis
MADQASQANGNQDVIEGELIVSVEPKNGKPDVSIQSAQSVTGQEDVLKSKGFTIVDTLHVEDSSVKPLVSKNFNKKVVEKMGLVYLVQYSPDQFKSSNIAKKELRKELMDLGFKVRYISENYKMMAIEGTATLQAVHPNQNWHYNMIKAPEAWAITSGSSSVKVAVLDTGIDHNHPSLANFVNTNLGRSFVGGNTMDVQGHGTHVAGTIASYGSVSGVMQSATLIPVKVLDNSGSGSLYGITQGILYAADIDADVINMSLGGGGYNQSMDEAVQTAVAQGTIVVAATGNDGASSISYPAAYSSVIAVGSVDSNRTRSSFSNYGSGLEVMAPGSNIYSTYPNSRYTSLSGTSMATPHVAGVAGLIRAANPDILVAQARQILRDTAQEAGSFTQYGYGIVDAHAAVVAASGGSGG

SEQ ID NO: 813 - DNA, 1239 bp, synthetic construct
  misc_feature 1..1239: note = Variant of serine peptidase from Bacillus sinesaloumensis
  source 1..1239: mol_type = other DNA
atggcagatcaagctagtcaagctaatggaaaccaggacgtcattgaaggcgagctgatcgtttcagtggaaccgaagaacggtaaacctgatgtgagcattcaaagtgcacaatccgtaacagggcaggaagacgtccttaaatcgaaaggctttacgatcgttgataccttgcatgtagaggatagcagcgtcaagccactcgtctcgaagaatttcaataagaaagtggtggagaagatgggactggtgtatcttgttcaatactctccggaccagtttaaaagttccaacattgcgaagaaagaactcagaaaagaattgatggatctgggctttaaagtccgctatataagcgaaaattacaagatgatggcgatcgaaggtacagccactcttcaggcggtgcaccctaaccaaaactggcattataatatgattaaagctccggaagcgtgggctattacgtctggatcctcgagcgttaaagtagcagtcctggatacagggatcgaccataatcacccatccttggccaacttcgtgaatactaatcttggcatgtcgtttgttggaggaaacaccatggatgttcaaggtcatggcacacatgttgctggcacgattgcatcttatgggagtgtaagcggagtgatgcagagtgcgacactgatcccggtcaaagtgctcgataattctggcagcgggtccctttacggtattacgcaaggcatattgtatgccgccgacatcgatgcggacgtcattaacatgtctctgggtggaggaggctataatcagagcatggatgaggctgttcaaacagcagttgctcagggaaccattgtagtagcagcgactggcaatgatggtgcatcgtcgatcagttatcctgctgcctacagcagcgtcattgcggtgggatctgtggactccaatcgtacccgatcctcgttttctaactatggatctgggcttgaagttatggcaccgggcagcaacatctacagtacgtatcctaattccagatatacatctttgagtggtacaagcatggctactccgcacgttgcgggcgtagctgggctcattcgcgcagccaacccagacataagtgtcgcgcaagcccgtcagattctgcgggataccgcgcaagaagcaggatcgttcacacagtacggctatggaatcgtcgatgctcatgccgccgttgttgctgcatccggtggtagcggcggc

SEQ ID NO: 814 - protein, 413 aa, synthetic construct
  REGION 1..413: note = Variant of serine peptidase from Bacillus sinesaloumensis
MADQASQANGNQDVIEGELIVSVEPKNGKPDVSIQSAQSVTGQEDVLKSKGFTIVDTLHVEDSSVKPLVSKNFNKKVVEKMGLVYLVQYSPDQFKSSNIAKKELRKELMDLGFKVRYISENYKMMAIEGTATLQAVHPNQNWHYNMIKAPEAWAITSGSSSVKVAVLDTGIDHNHPSLANFVNTNLGMSFVGGNTMDVQGHGTHVAGTIASYGSVSGVMQSATLIPVKVLDNSGSGSLYGITQGILYAADIDADVINMSLGGGGYNQSMDEAVQTAVAQGTIVVAATGNDGASSISYPAAYSSVIAVGSVDSNRTRSSFSNYGSGLEVMAPGSNIYSTYPNSRYTSLSGTSMATPHVAGVAGLIRAANPDISVAQARQILRDTAQEAGSFTQYGYGIVDAHAAVVAASGGSGG

SEQ ID NO: 815 - DNA, 1239 bp, synthetic construct
  misc_feature 1..1239: note = Variant of serine peptidase from Bacillus sinesaloumensis
  source 1..1239: mol_type = other DNA
atggcagatcaagctagtcaagctaatggaaaccaggacgtcattgaaggcgagctgatcgtttcagtggaaccgaagaacggtaaacctgatgtgagcattcaaagtgcacaatccgtaacagggcaggaagacgtccttaaatcgaaaggctttacgatcgttgataccttgcatgtagaggatagcagcgtcaagccactcgtctcgaagaatttcaataagaaagtggtggagaagatgggactggtgtatcttgttcaatactctccggaccagtttaaaagttccaacattgcgaagaaagaactcagaaaagaattgatggatctgggctttaaagtccgctatataagcgaaaattacaagatgatggcgatcgaaggtacagccactcttcaggaggtgcaccctaaccaagtttggcattataatatgattaaagctccggaagcgtgggctattacgtctggatcctctagcgttaaagtagcagtcctggatacagggatcgaccataatcacccatccttggccaacttcgtgaatactaatcttggcctgtcgtttgttggaggaaacaccatggatgttcaaggtcatggcacacatgttgctggcacgattgcatcttatgggagtgtaagcggagtgatgcagagtgcgacactgatcccggtcaaagtgctcgataattctggcagcgggtccctttacggtattacgcaaggcatattgtatgccgccgacatcgatgcggacgtcattaacatgtctctgggtggaggaggctataatcagagcatggatgaggctgttcaaacagcagttgctcagggaaccattgtagtagcagcgactggcaatgatggtgcatcgtcgatcagttatcctgctgcctacagcagcgtcattgcggtgggatctgtgacttccaatcgtacccgatcctcgttttctaactatggatctgggcttgaagttatggcaccgggcagcaacatctacagtacgtatcctaattccagatatacatctttgagtggtacaagcatggctactccgcacgttgcgggcgtagctgggctcattcgcgcagccaacccagacatactggtcgcgcaagcccgtcagattctgcgggataccgcgcaagaagcaggatcgttcacacagtacggctatggaatcgtcgatgctcatgccgccgttgttgctgcatccggtggtagcggcggc

SEQ ID NO: 816 - protein, 413 aa, synthetic construct
  REGION 1..413: note = Variant of serine peptidase from Bacillus sinesaloumensis
MADQASQANGNQDVIEGELIVSVEPKNGKPDVSIQSAQSVTGQEDVLKSKGFTIVDTLHVEDSSVKPLVSKNFNKKVVEKMGLVYLVQYSPDQFKSSNIAKKELRKELMDLGFKVRYISENYKMMAIEGTATLQEVHPNQVWHYNMIKAPEAWAITSGSSSVKVAVLDTGIDHNHPSLANFVNTNLGLSFVGGNTMDVQGHGTHVAGTIASYGSVSGVMQSATLIPVKVLDNSGSGSLYGITQGILYAADIDADVINMSLGGGGYNQSMDEAVQTAVAQGTIVVAATGNDGASSISYPAAYSSVIAVGSVTSNRTRSSFSNYGSGLEVMAPGSNIYSTYPNSRYTSLSGTSMATPHVAGVAGLIRAANPDILVAQARQILRDTAQEAGSFTQYGYGIVDAHAAVVAASGGSGG

SEQ ID NO: 817 - DNA, 1239 bp, synthetic construct
  misc_feature 1..1239: note = Variant of serine peptidase from Bacillus sinesaloumensis
  source 1..1239: mol_type = other DNA
atggcagatcaagctagtcaagctaatggaaaccaggacgtcattgaaggcgagctgatcgtttcagtggaaccgaagaacggtaaacctgatgtgagcattcaaagtgcacaatccgtaacagggcaggaagacgtccttaaatcgaaaggctttacgatcgttgataccttgcatgtagaggatagcagcgtcaagccactcgtctcgaagaatttcaataagaaagtggtggagaagatgggactggtgtatcttgttcaatactctccggaccagtttaaaagttccaacattgcgaagaaagaactcagaaaagaattgatggatctgggctttaaagtccgctatataagcgaaaattacaagatgatggcgatcgaaggtacagccactcttcaggcggtgcaccctaaccaagtttggcattataatatgattaaagctccggaagcgtgggctattacgtctggatccctgagcgttaaagtagcagtcctggatacagggatcgaccataatcacccatccttggccaacttcgtgaatactaatcttggccggtcgtttgttggaggaaacaccatggatgttcaaggtcatggcacacatgttgctggcacgattgcatcttatgggagtgtaagcggagtgatgcagagtgcgacactgatcccggtcaaagtgctcgataattctggcagcgggtccctttacggtattacgcaaggcatattgtatgccgccgacatcgatgcggacgtcattaacatgtctctgggtggaggaggctataatcagagcatggatgaggctgttcaaacagcagttgctatgggaaccattgtagtagcagcgactggcaatgatggtgcatcgtcgatcagttatcctgctgcctacagcagcgtcattgcggtgggatctgtgacttccaatcgtacccgatcctcgttttctaactatggatctgggcttgaagttatggcaccgggcagcaacatctacagtacgtatcctaattccagatatacatctttgagtggtacaagcatggctactccgcacgttgcgggcgtagctgggctcattcgcgcagccaacccagacatatctgtcgcgcaagcccgtcagattctgcgggataccgcgcaagaagcaggatcgttcacacagtacggctatggaatcgtcgatgctcatgccgccgttgttgctgcatccggtggtagcggcggc

SEQ ID NO: 818 - protein, 413 aa, synthetic construct
  REGION 1..413: note = Variant of serine peptidase from Bacillus sinesaloumensis
MADQASQANGNQDVIEGELIVSVEPKNGKPDVSIQSAQSVTGQEDVLKSKGFTIVDTLHVEDSSVKPLVSKNFNKKVVEKMGLVYLVQYSPDQFKSSNIAKKELRKELMDLGFKVRYISENYKMMAIEGTATLQAVHPNQVWHYNMIKAPEAWAITSGSLSVKVAVLDTGIDHNHPSLANFVNTNLGRSFVGGNTMDVQGHGTHVAGTIASYGSVSGVMQSATLIPVKVLDNSGSGSLYGITQGILYAADIDADVINMSLGGGGYNQSMDEAVQTAVAMGTIVVAATGNDGASSISYPAAYSSVIAVGSVTSNRTRSSFSNYGSGLEVMAPGSNIYSTYPNSRYTSLSGTSMATPHVAGVAGLIRAANPDISVAQARQILRDTAQEAGSFTQYGYGIVDAHAAVVAASGGSGG

SEQ ID NO: 819 - DNA, 1239 bp, synthetic construct
  misc_feature 1..1239: note = Variant of serine peptidase from Bacillus sinesaloumensis
  source 1..1239: mol_type = other DNA
atggcagatcaagctagtcaagctaatggaaaccaggacgtcattgaaggcgagctgatcgtttcagtggaaccgaagaacggtaaacctgatgtgagcattcaaagtgcacaatccgtaacagggcaggaagacgtccttaaatcgaaaggctttacgatcgttgataccttgcatgtagaggatagcagcgtcaagccactcgtctcgaagaatttcaataagaaagtggtggagaagatgggactggtgtatcttgttcaatactctccggaccagtttaaaagttccaacattgcgaagaaagaactcagaaaagaattgatggatctgggctttaaagtccgctatataagcgaaaattacaagatgatggcgatcgaaggtacagccactcttcaggcagtacaccctaaccaaaactggcattataatatgattaaagctccggaagcgtgggctattacgtctggatcctctagcgttaaagtagcagtcctggatacagggatcgaccataatcacccatccttggccaacttcgtgaatactaatcttggccggtcgtttgttggaggaaacaccatggatgttcaaggtcatggcacacatgttgctggcacgattgcatcttatgggagtgtaagcggagtgatgcagagtgcgacactgatcccggtcaaagtgctcgataattctggcagcgggtccctttacggtattacgcaaggcatattgtatgccgccgacatcgatgcggacgtcattaacatgtctctgggtggaggaggctataatcagagcatggatgaggctgttcaaacagcagttgctcagggaaccattgtagtagcagcgactggcaatgatggtgcatcgtcgatcagttatcctgctgcctacagcagcgtcattgcggtgggatctgtgacgagtcaacgtacacgatcctcgttttctaactatggatctgggcttgaagttatggcaccgggcagcaacatctacagtacgtatcctaattccagatatacatctttgagtggtacaagcatggctactccgcacgttgcgggcgtagctgggctcattcgcgcagccaacccagacatatctgtcgcgcaagcccgtcagattctgcgggataccgcgcaagaagcaggatcgttcacatactacggctatggaatcgtcgatgctcatgccgccgttgttgctgcatccggtggtagcggcggc

SEQ ID NO: 820 - protein, 413 aa, synthetic construct
  REGION 1..413: note = Variant of serine peptidase from Bacillus sinesaloumensis
MADQASQANGNQDVIEGELIVSVEPKNGKPDVSIQSAQSVTGQEDVLKSKGFTIVDTLHVEDSSVKPLVSKNFNKKVVEKMGLVYLVQYSPDQFKSSNIAKKELRKELMDLGFKVRYISENYKMMAIEGTATLQAVHPNQNWHYNMIKAPEAWAITSGSSSVKVAVLDTGIDHNHPSLANFVNTNLGRSFVGGNTMDVQGHGTHVAGTIASYGSVSGVMQSATLIPVKVLDNSGSGSLYGITQGILYAADIDADVINMSLGGGGYNQSMDEAVQTAVAQGTIVVAATGNDGASSISYPAAYSSVIAVGSVTSQRTRSSFSNYGSGLEVMAPGSNIYSTYPNSRYTSLSGTSMATPHVAGVAGLIRAANPDISVAQARQILRDTAQEAGSFTYYGYGIVDAHAAVVAASGGSGG

SEQ ID NO: 821 - DNA, 1239 bp, synthetic construct
  misc_feature 1..1239: note = Variant of serine peptidase from Bacillus sinesaloumensis
  source 1..1239: mol_type = other DNA
atggcagatcaagctagtcaagctaatggaaaccaggacgtcattgaaggcgagctgatcgtttcagtggaaccgaagaacggtaaacctgatgtgagcattcaaagtgcacaatccgtaacagggcaggaagacgtccttaaatcgaaaggctttacgatcgttgataccttgcatgtagaggatagcagcgtcaagccactcgtctcgaagaatttcaataagaaagtggtggagaagatgggactggtgtatcttgttcaatactctccggaccagtttaaaagttccaacattgcgaagaaagaactcagaaaagaattgatggatctgggctttaaagtccgctatataagcgaaaattacaagatgatggcgatcgaaggtactgccactcttcaagcagtacaccctaaccaaaactggcattataatatgattaaagctccggaagcgtgggctattacgtctggatcctctagcgttaaagtagcagtcctggatacagggatcgaccataatcacccatccttggccaacttcgtgaatactaatcttggccggtcgtttgttggaggaaacaccatggatgttcaaggtcatggcacacatgttgctggcacgattgcatcttatgggagtgtaagcggagtgatgcagagtgcgacactgatcccggtcaaagtgctcgataattctggcagcgggtccctttacggtattacgcaaggcatattgtatgccgccgacatcgatgcggacgtcattaacatgtctctgggtggaggtggctataatcagagcatggatgaggctgttcaaacagcagttgctcagggaaccattgtagtagcagcgactggcaatgatggtgcatcgtcgatcagttatcctgctgcctacagcagcgtcattgcggtgggatctgtgacgtccaatcgtacacgatcctcgttttctaactatggatctgggcttgaagttatggcaccgggcagcaacatctacagtacgtatcctaatggcagatatacatctttgagtggtacaagcatggctactccgcacgttgcgggcgtagctgggctcattcgcgcagccaacccagacatatctgtcgcgcaagcccgtcagattctgcgggataccgcgcaagaagcaggatcgttcacatactacggctatggaatcgtcgatgctcatgccgccgttgttgctgcatccggtggtagcggcggc

SEQ ID NO: 822 - protein, 413 aa, synthetic construct
  REGION 1..413: note = Variant of serine peptidase from Bacillus sinesaloumensis
MADQASQANGNQDVIEGELIVSVEPKNGKPDVSIQSAQSVTGQEDVLKSKGFTIVDTLHVEDSSVKPLVSKNFNKKVVEKMGLVYLVQYSPDQFKSSNIAKKELRKELMDLGFKVRYISENYKMMAIEGTATLQAVHPNQNWHYNMIKAPEAWAITSGSSSVKVAVLDTGIDHNHPSLANFVNTNLGRSFVGGNTMDVQGHGTHVAGTIASYGSVSGVMQSATLIPVKVLDNSGSGSLYGITQGILYAADIDADVINMSLGGGGYNQSMDEAVQTAVAQGTIVVAATGNDGASSISYPAAYSSVIAVGSVTSNRTRSSFSNYGSGLEVMAPGSNIYSTYPNGRYTSLSGTSMATPHVAGVAGLIRAANPDISVAQARQILRDTAQEAGSFTYYGYGIVDAHAAVVAASGGSGG

SEQ ID NO: 823 - DNA, 1239 bp, synthetic construct
  misc_feature 1..1239: note = Variant of serine peptidase from Bacillus sinesaloumensis
  source 1..1239: mol_type = other DNA
atggcagatcaagctagtcaagctaatggaaaccaggacgtcattgaaggcgagctgatcgtttcagtggaaccgaagaacggtaaacctgatgtgagcattcaaagtgcacaatccgtaacagggcaggaagacgtccttaaatcgaaaggctttacgatcgttgataccttgcatgtagaggatagcagcgtcaagccactcgtctcgaagaatttcaataagaaagtggtggagaagatgggactggtgtatcttgttcaatactctccggaccagtttaaaagttccaacattgcgaagaaagaactcagaaaagaattgatggatctgggctttaaagtccgctatataagcgaaaattacaagatgatggcgatcgaaggtacagccactcttcaggcagtacaccctaaccaaaactggcattataatatgattaaagctccggaagcgtgggctattacgtctggatcctctagcgttaaagtagcagtcctggatacagggatcgaccataatcacccatccttggccaacttcgtgaatactaatcttggccggtcgtttgttggaggaaacaccatggatgttcaaggtcatggcacacatgttgctggcacgattgcatcttatgggagtgtaagcggagtgatgcagagtgcgacactgatcccggtcaaagtgctcgataattctggcagcgggtccctttacggtattacgcaaggcatattgtatgccgccgacatcgatgcggacgtcattaacatgtctctgggtggaggaggctataatcagagcatggatgaggctgttcaaacagcagttgctctgggaaccattgtagtagcagcgactggcaatgatggtgcatcgtcgatcagttatcctgctgcctacagcagcgtcattgcggtgggatctgtgacgtccaatcgtacacgatcctcgttttctaactatggatctgggcttgaagttatggcaccgggcagcaacatctacagtacgtatcctaattccagatatacatctttgagtggtacaagcatggctactccgcacgttgcgggcgtagctgggctcattcgcgcagccaacccagacatatctgtcgcgcaagcccgtcagattctgcgggataccgcgcaagaagcaggatcgttcacatactacggctatggaatcgtcgatgctcatgccgccgttgttgctgcatccggtggtagcggcggc

SEQ ID NO: 824 - protein, 413 aa, synthetic construct
  REGION 1..413: note = Variant of serine peptidase from Bacillus sinesaloumensis
MADQASQANGNQDVIEGELIVSVEPKNGKPDVSIQSAQSVTGQEDVLKSKGFTIVDTLHVEDSSVKPLVSKNFNKKVVEKMGLVYLVQYSPDQFKSSNIAKKELRKELMDLGFKVRYISENYKMMAIEGTATLQAVHPNQNWHYNMIKAPEAWAITSGSSSVKVAVLDTGIDHNHPSLANFVNTNLGRSFVGGNTMDVQGHGTHVAGTIASYGSVSGVMQSATLIPVKVLDNSGSGSLYGITQGILYAADIDADVINMSLGGGGYNQSMDEAVQTAVALGTIVVAATGNDGASSISYPAAYSSVIAVGSVTSNRTRSSFSNYGSGLEVMAPGSNIYSTYPNSRYTSLSGTSMATPHVAGVAGLIRAANPDISVAQARQILRDTAQEAGSFTYYGYGIVDAHAAVVAASGGSGG

SEQ ID NO: 825 - DNA, 1239 bp, synthetic construct
  misc_feature 1..1239: note = Variant of serine peptidase from Bacillus sinesaloumensis
  source 1..1239: mol_type = other DNA
atggcagatcaagctagtcaagctaatggaaaccaggacgtcattgaaggcgagctgatcgtttcagtggaaccgaagaacggtaaacctgatgtgagcattcaaagtgcacaatccgtaacagggcaggaagacgtccttaaatcgaaaggctttacgatcgttgataccttgcatgtagaggatagcagcgtcaagccactcgtctcgaagaatttcaataagaaagtggtggagaagatgggactggtgtatcttgttcaatactctccggaccagtttaaaagttccaacattgcgaagaaagaactcagaaaagaattgatggatctgggctttaaagtccgctatataagcgaaaattacaagatgatggcgatcacgggtactgccactcttcaagcagtacaccctaaccaaaactggcattataatatgattaaagctccggaagcgtgggctattacgtctggatcctctagcgttaaagtagcagtcctggatacagggatcgaccataatcacccatccttggccaacttcgtgaatactaatcttggccggtcgtttgttggaggaaacaccatggatgtgcaaggtcatggcacacatgttgctggcacgattgcatcttatgggagtgtaagcggagtgatgcagagtgcgacactgatcccggtcaaagtgctcgataattctggcagcgggtccctttacggtattacgcaaggcatattgtatgccgccgacatcgatgcggacgtcattaacatgtctctgggtggaggtggctataatcagagcatggatgaggctgttcaaacagcagttgctcagggaaccattgtagtagcagcgactggcaatgatggtgcatcgtcgatcagttatcctgctgcctacagcagcgtcattgcggtgggatctgtgacgtccaatcgtacacgatcctcgttttctaactatggatctgggcttgaagttatggcaccgggcagcaacatctacagtacgtatcctaatagcagatatacatctttgagtggtacaagcatggctactccgcacgttgcgggcgtagctgggctcattcgcgcagccaacccagacatatctgtcgcgcaagcccgtcagattctgcgggataccgcgcaagaagcaggatcgttcacacaatacggctatggaatcgtcgatgctcatgccgccgttgttgctgcatccggtggtagcggcggc

SEQ ID NO: 826 - protein, 413 aa, synthetic construct; identical to SEQ ID NO: 440
  REGION 1..413: note = Variant of serine peptidase from Bacillus sinesaloumensis

SEQ ID NO: 827 - DNA, 1239 bp, synthetic construct
  misc_feature 1..1239: note = Variant of serine peptidase from Bacillus sinesaloumensis
  source 1..1239: mol_type = other DNA
atggcagatcaagctagtcaagctaatggaaaccaggacgtcattgaaggcgagctgatcgtttcagtggaaccgaagaacggtaaacctgatgtgagcattcaaagtgcacaatccgtaacagggcaggaagacgtccttaaatcgaaaggctttacgatcgttgataccttgcatgtagaggatagcagcgtcaagccactcgtctcgaagaatttcaataagaaagtggtggagaagatgggactggtgtatcttgttcaatactctccggaccagtttaaaagttccaacattgcgaagaaagaactcagaaaagaattgatggatctgggctttaaagtccgctatataagcgaaaattacaagatgatggcgatcgaaggtacagccactcttcaggcagtacaccctaaccaaaactggcattataatatgattaaagctccggaagcgtgggctattacgtctggatcctctagcgttaaagtagcagtcctggatacagggatcgaccataatcacccatccttggccaacttcgtgaatactaatcttggccggtcgtttgttggaggaaacaccatggatgggcaaggtcatggcacacatgttgctggcacgattgcatcttatgggagtgtaagcggagtgatgcagagtgcgacactgatcccggtcaaagtgctcgataattctggcagcgggtccctttacggtattacgcaaggcatattgtatgccgccgacatcgatgcggacgtcattaacatgtctctgggtggaggtggctataatcagagcatggatgaggctgttcaaacagcagttgctcagggaaccattgtagtagcagcgactggcaatgatggtgcatcgtcgatcagttatcctgctgcctacagcagcgtcattgcggtgggatctgtgacgtccaatcgtacacgatcctcgttttctaactatggatctgggcttgaagttatggcaccgggcagcaacatctacagtacgtatcctaatggcagatatacatctttgagtggtacaagcatggctactccgcacgttgcgggcgtagctgggctcattcgcgcagccaacccagacatatctgtcgcgcaagcccgtcagattctgcgggataccgcgcaagaagcaggatcgttcacacagtacggctatggaatcgtcgatgctcatgccgccgttgttgctgcatccggtggtagcggcggc

SEQ ID NO: 828 - protein, 413 aa, synthetic construct
  REGION 1..413: note = Variant of serine peptidase from Bacillus sinesaloumensis
MADQASQANGNQDVIEGELIVSVEPKNGKPDVSIQSAQSVTGQEDVLKSKGFTIVDTLHVEDSSVKPLVSKNFNKKVVEKMGLVYLVQYSPDQFKSSNIAKKELRKELMDLGFKVRYISENYKMMAIEGTATLQAVHPNQNWHYNMIKAPEAWAITSGSSSVKVAVLDTGIDHNHPSLANFVNTNLGRSFVGGNTMDGQGHGTHVAGTIASYGSVSGVMQSATLIPVKVLDNSGSGSLYGITQGILYAADIDADVINMSLGGGGYNQSMDEAVQTAVAQGTIVVAATGNDGASSISYPAAYSSVIAVGSVTSNRTRSSFSNYGSGLEVMAPGSNIYSTYPNGRYTSLSGTSMATPHVAGVAGLIRAANPDISVAQARQILRDTAQEAGSFTQYGYGIVDAHAAVVAASGGSGG

SEQ ID NO: 829 - DNA, 1239 bp, synthetic construct
  misc_feature 1..1239: note = Variant of serine peptidase from Bacillus sinesaloumensis
  source 1..1239: mol_type = other DNA
atggcagatcaagctagtcaagctaatggaaaccaggacgtcattgaaggcgagctgatcgtttcagtggaaccgaagaacggtaaacctgatgtgagcattcaaagtgcacaatccgtaacagggcaggaagacgtccttaaatcgaaaggctttacgatcgttgataccttgcatgtagaggatagcagcgtcaagccactcgtctcgaagaatttcaataagaaagtggtggagaagatgggactggtgtatcttgttcaatactctccggaccagtttaaaagttccaacattgcgaagaaagaactcagaaaagaattgatggatctgggctttaaagtccgctatataagcgaaaattacaagatgatggcgatcgaaggtacagccactcttcaggcagtacaccctaaccaaaactggcattataacatgattaaagctccggaagcgtgggctattacgtctggatcctctagcgttaaagtagcagtcctggatacagggatcgaccataatcacccatccttggccaacttcgtgaatactaatcttggccggtcgtttgttggaggaaacaccatggatgttcaaggtcatggcacacatgttgctggcacgattgcatcttatgggagtgtaagcggagtgatgcagagtgcgacactgatcccggtcaaagtgctcgataattctggcagcgggtccctttacggtattacgcaaggcatattgtatgccgccgacatcgatgcggacgtcattaacatgtctctgggtggaggtggctataatcagagcatggatgaggctgttcaaacagcagttgctcagggaaccattgtagtagcagcgactggcaatgatggtgcatcgtcgatcagttatcctgctgcctacagcagcgtcattgcggtgggatctgtgacgagtcaacgtacacgatcctcgttttctaactatggatctgggcttgaagttatggcaccgggcagcaacatctacagtacgtatcctaattccagatatacatctttgagtggtacaagcatggctactccgcacgttgcgggcgtagctgggctcattcgcgcagccaacccagacatatctgtcgcgcaagcccgtcagattctgcgggataccgcgcaagaagcaggatcgttcacacagtacggctatggaatcgtcgatgctcatgccgccgttgttgctgcatccggtggtagcggcggc

SEQ ID NO: 830 - protein, 413 aa, synthetic construct; identical to SEQ ID NO: 460
  REGION 1..413: note = Variant of serine peptidase from Bacillus sinesaloumensis

SEQ ID NO: 831 - DNA, 1239 bp, synthetic construct
  misc_feature 1..1239: note = Variant of serine peptidase from Bacillus sinesaloumensis
  source 1..1239: mol_type = other DNA
atggcagatcaagctagtcaagctaatggaaaccaggacgtcattgaaggcgagctgatcgtttcagtggaaccgaagaacggtaaacctgatgtgagcattcaaagtgcacaatccgtaacagggcaggaagacgtccttaaatcgaaaggctttacgatcgttgataccttgcatgtagaggatagcagcgtcaagccactcgtctcgaagaatttcaataagaaagtggtggagaagatgggactggtgtatcttgttcaatactctccggaccagtttaaaagttccaacattgcgaagaaagaactcagaaaagaattgatggatctgggctttaaagtccgctatataagcgaaaattacaagatgatggcgatcacgggtactgccactcttcaagcagtacaccctaaccaaaactggcattataatatgattaaagctccggaagcgtgggctattacgtctggatcctctagcgttaaagtagcagtcctggatacagggatcgaccataatcacccatccttggccaacttcgtgaatactaatcttggccggtcgtttgttggaggaaacaccatggatgttcaaggtcatggcacacatgttgctggcacgattgcatcttatgggagtgtaagcggagtgatgcagagtgcgacactgatcccggtcaaagtgctcgataattctggcagcgggtccctttacggtattacgcaaggcatattgtatgccgccgacatcgatgcggacgtcattaacatgtctctgggtggaggaggctataatcagagcatggatgaggctgttcaaacagcagttgctcagggaaccattgtagtagcagcgactggcaatgatggtgcatcgtcgatcagttatcctgctgcctacagcagcgtcattgcggtgggatctgtgacgattaatcgtacacgatcctcgttttctaactatggatctgggcttgaagttatggcaccgggcagcaacatctacagtacgtatcctaattccagatatacatctttgagtggtacaagcatggctactccgcacgttgcgggcgtagctgggctcattcgcgcagccaacccagacatatctgtcgcgcaagcccgtcagattctgcgggataccgcgcaagaagcaggatcgttcacacaatacggctatggaatcgtcgatgctcatgccgccgttgttgctgcatccggtggtagcggcggc

SEQ ID NO: 832 - protein, 413 aa, synthetic construct
  REGION 1..413: note = Variant of serine peptidase from Bacillus sinesaloumensis
MADQASQANGNQDVIEGELIVSVEPKNGKPDVSIQSAQSVTGQEDVLKSKGFTIVDTLHVEDSSVKPLVSKNFNKKVVEKMGLVYLVQYSPDQFKSSNIAKKELRKELMDLGFKVRYISENYKMMAITGTATLQAVHPNQNWHYNMIKAPEAWAITSGSSSVKVAVLDTGIDHNHPSLANFVNTNLGRSFVGGNTMDVQGHGTHVAGTIASYGSVSGVMQSATLIPVKVLDNSGSGSLYGITQGILYAADIDADVINMSLGGGGYNQSMDEAVQTAVAQGTIVVAATGNDGASSISYPAAYSSVIAVGSVTINRTRSSFSNYGSGLEVMAPGSNIYSTYPNSRYTSLSGTSMATPHVAGVAGLIRAANPDISVAQARQILRDTAQEAGSFTQYGYGIVDAHAAVVAASGGSGG

SEQ ID NO: 833 - DNA, 1239 bp, synthetic construct
  misc_feature 1..1239: note = Variant of serine peptidase from Bacillus sinesaloumensis
  source 1..1239: mol_type = other DNA
atggcagatcaagctagtcaagctaatggaaaccaggacgtcattgaaggcgagctgatcgtttcagtggaaccgaagaacggtaaacctgatgtgagcattcaaagtgcacaatccgtaacagggcaggaagacgtccttaaatcgagaggctttacgatcgttgataccttgcatgtagaggatagcagcgtcaagccactcgtctcgaagaatttcaataagaaagtggtggagaagatgggactggtgtatcttgttcaatactctccggaccagtttaaaagttccaacattgcgaagaaagaactcagaaaagaattgatggatctgggctttaaagtccgctatataagcgaaaattacaagatgatggcgatcgaaggtacagccactcttcaggcagtacaccctaaccaaaactggcattataatatgattaaagctccggaagcgtgggctattacgtctggatcctctagcgttaaagtagcagtcctggatacagggatcgaccataatcacccatccttggccaacttcgtgaatactaatcttggccggtcgtttgttggaggaaacaccatggatgttcaaggtcatggcacacatgttgctggcacgattgcatcttatgggagtgtaagcggagtgatgcagagtgcgacactgatcccggtcaaagtgctcgataattctggcagcgggtccctttacggtattacgcaaggcatattgtatgccgccgacatcgatgcggacgtcattaacatgtctctgggtggaggaggctataatcagagcatggatgaggctgttcaaacagcagttgctcagggaaccattgtagtagcagcgactggcaatgatggtgcatcgtcgatcagttatcctgctgcctacagcagcgtcattgcggtgggatctgtgacgtccaatcgtacacgatcctcgttttctaactatggatctgggcttgaagttatggcaccgggcagcaacatctacagtacgtatcctaattccagatatacatctttgagtggtacaagcatggctactccgcacgttgcgggcgtagctgggctcattcgcgcagccaacccagacatatctgtcgcgcaagcccgtcagattctgcgggataccgcgcaagaagcaggatcgttcacacaatacggctatggaatcgtcgatgctcatgccgccgttgttgctgcatccggtggtagcggcggc

SEQ ID NO: 834 - protein, 413 aa, synthetic construct
  REGION 1..413: note = Variant of serine peptidase from Bacillus sinesaloumensis
MADQASQANGNQDVIEGELIVSVEPKNGKPDVSIQSAQSVTGQEDVLKSRGFTIVDTLHVEDSSVKPLVSKNFNKKVVEKMGLVYLVQYSPDQFKSSNIAKKELRKELMDLGFKVRYISENYKMMAIEGTATLQAVHPNQNWHYNMIKAPEAWAITSGSSSVKVAVLDTGIDHNHPSLANFVNTNLGRSFVGGNTMDVQGHGTHVAGTIASYGSVSGVMQSATLIPVKVLDNSGSGSLYGITQGILYAADIDADVINMSLGGGGYNQSMDEAVQTAVAQGTIVVAATGNDGASSISYPAAYSSVIAVGSVTSNRTRSSFSNYGSGLEVMAPGSNIYSTYPNSRYTSLSGTSMATPHVAGVAGLIRAANPDISVAQARQILRDTAQEAGSFTQYGYGIVDAHAAVVAASGGSGG

SEQ ID NO: 835 - DNA, 1239 bp, synthetic construct
  misc_feature 1..1239: note = Variant of serine peptidase from Bacillus sinesaloumensis
  source 1..1239: mol_type = other DNA
atggcagatcaagctagtcaagctaatggaaaccaggacgtcattgaaggcgagctgatcgtttcagtggaaccgaagaacggtaaacctgatgtgagcattcaaagtgcacaatccgtaacagggcaggaagacgtccttaaatcgaaaggctttacgatcgttgataccttgcatgtagaggatagcagcgtcaagccactcgtctcgaagaatttcaataagaaagtggtggagaagatgggactggtgtatcttgttcaatactctccggaccagtttaaaagttccaacattgcgaagaaagaactcagaaaagaattgatggatctgggctttaaagtccgctatataagcgaaaattacaagatgatggcgatcgaaggtactgccactcttcaagcagtacaccctaaccaaaactggcattatgaaatgattaaagctccggaagcgtgggctattacgtctggatcctctagcgttaaagtagcagtcctggatacagggatcgaccataatcacccatccttggccaacttcgtgaatactaatcttggccggtcgtttgttggaggaaacaccatggatgttcaaggtcatggcacacatgttgctggcacgattgcatcttatgggagtgtaagcggagtgatgcagagtgcgacactgatcccggtcaaagtgctcgataattctggcagcgggtccctttacggtattacgcaaggcatattgtatgccgccgacatcgatgcggacgtcattaacatgtctctgggtggaagtggctataatcagagcatggatgaggctgttcaaacagcagttgctcagggaaccattgtagtagcagcgactggcaatgatggtgcatcgtcgatcagttatcctgctgcctacagcagcgtcattgcggtgggatctgtgacgtccaatcgtacacgatcctcgttttctaactatggatctgggcttgaagttatggcaccgggcagcaacatctacagtacgtatcctaattccagatatacatctttgagtggtacaagcatggctactccgcacgttgcgggcgtagctgggctcattcgcgcagccaacccagacatatctgtcgcgcaagcccgtcagattctgcgggataccgcgcaagaagcaggatcgttcacacagtacggctatggaatcgtcgatgctcatgccgccgttgttgctgcatccggtggtagcggcggc

SEQ ID NO: 836 - protein, 413 aa, synthetic construct
  REGION 1..413: note = Variant of serine peptidase from Bacillus sinesaloumensis
MADQASQANGNQDVIEGELIVSVEPKNGKPDVSIQSAQSVTGQEDVLKSKGFTIVDTLHVEDSSVKPLVSKNFNKKVVEKMGLVYLVQYSPDQFKSSNIAKKELRKELMDLGFKVRYISENYKMMAIEGTATLQAVHPNQNWHYEMIKAPEAWAITSGSSSVKVAVLDTGIDHNHPSLANFVNTNLGRSFVGGNTMDVQGHGTHVAGTIASYGSVSGVMQSATLIPVKVLDNSGSGSLYGITQGILYAADIDADVINMSLGGSGYNQSMDEAVQTAVAQGTIVVAATGNDGASSISYPAAYSSVIAVGSVTSNRTRSSFSNYGSGLEVMAPGSNIYSTYPNSRYTSLSGTSMATPHVAGVAGLIRAANPDISVAQARQILRDTAQEAGSFTQYGYGIVDAHAAVVAASGGSGG

SEQ ID NO: 837 - DNA, 1239 bp, synthetic construct
  misc_feature 1..1239: note = Variant of serine peptidase from Bacillus sinesaloumensis
  source 1..1239: mol_type = other DNA
atggcagatcaagctagtcaagctaatggaaaccaggacgtcattgaaggcgagctgatcgtttcagtggaaccgaagaacggtaaacctgatgtgagcattcaaagtgcacaatccgtaacagggcaggaagacgtccttaaatcgaaaggctttacgatcgttgataccttgcatgtagaggatagcagcgtcaagccactcgtctcgaagaatttcaataagaaagtggtggagaagatgggactggtgtatcttgttcaatactctccggaccagtttaaaagttccaacattgcgaagaaagaactcagaaaagaattgatggatctgggctttaaagtccgctatataagcgaaaattacaagatgatggcgatcgaaggtacagccactcttcaggcagtacaccctaaccaaaactggcattataatatgattaaagctccggaagcgtgggctattacgtctggatcctctagcgttaaagtagcagtcctggatacagggatcgaccataatcacccatccttggccaacttcgtgaatactaatcttggccggtcgtttgttggaggaaacaccatggatgttcaaggtcatggcacacatgttgctggcacgattgcatcttatgggagtgtaagcggagtgatgcagagtgcgacactgatcccggtcaaagtgctcgataattctggcagcgggtccctttacggtattacgcaaggcatattgtatgccgccgacatcgatgcggacgtcattaacatgtctctgggtggaggaggctataatcagagcatggatgaggctgttcaaacagcagttgctcagggaaccattgtagtagcagcgactggcaatgatggtgcatcgtcgatcagttatcctgctgcctacagcagcgtcattgcggtgggatctgtgacgagtcaacgtacacgatcctcgttttctaactatggatctgggcttgaagttatggcaccgggcagcaacatctacagtacgtatcctaatggcagatatacatctttgagtggtacaagcatggctactccgcacgttgcgggcgtagctgggctcattcgcgcagccaacccagacatatctgtcgcgcaagcccgtcagattctgcgggataccgcgcaagaagcaggatcgttcacacaatacggctatggaatcgtcgatgctcatgccgccgttgttgctgcatccggtggtagcggcggc

SEQ ID NO: 838 - protein, 413 aa, synthetic construct
  REGION 1..413: note = Variant of serine peptidase from Bacillus sinesaloumensis
MADQASQANGNQDVIEGELIVSVEPKNGKPDVSIQSAQSVTGQEDVLKSKGFTIVDTLHVEDSSVKPLVSKNFNKKVVEKMGLVYLVQYSPDQFKSSNIAKKELRKELMDLGFKVRYISENYKMMAIEGTATLQAVHPNQNWHYNMIKAPEAWAITSGSSSVKVAVLDTGIDHNHPSLANFVNTNLGRSFVGGNTMDVQGHGTHVAGTIASYGSVSGVMQSATLIPVKVLDNSGSGSLYGITQGILYAADIDADVINMSLGGGGYNQSMDEAVQTAVAQGTIVVAATGNDGASSISYPAAYSSVIAVGSVTSQRTRSSFSNYGSGLEVMAPGSNIYSTYPNGRYTSLSGTSMATPHVAGVAGLIRAANPDISVAQARQILRDTAQEAGSFTQYGYGIVDAHAAVVAASGGSGG

SEQ ID NO: 839 - DNA, 1239 bp, synthetic construct
  misc_feature 1..1239: note = Variant of serine peptidase from Bacillus sinesaloumensis
  source 1..1239: mol_type = other DNA
atggcagatcaagctagtcaagctaatggaaaccaggacgtcattgaaggcgagctgatcgtttcagtggaaccgaagaacggtaaacctgatgtgagcattcaaagtgcacaatccgtaacagggcaggaagacgtccttaaatcgaaaggctttacgatcgttgataccttgcatgtagaggatagcagcgtcaagccactcgtctcgaagaatttcaataagaaagtggtggagaagatgggactggtgtatcttgttcaatactctccggaccagtttaaaagttccaacattgcgaagaaagaactcagaaaagaattgatggatctgggctttaaagtccgctatataagcgaaaattacaagatgatggcgatcgaaggtacagccactcttcaggcagtacaccctaaccaaaactggcattataatatgattaaagctccggaagcgtgggctattacgtctggatcctctagcgttaaagtagcagtcctggatacagggatcgaccataatcacccatccttggccaacttcgtgaatactaatcttggccggtcgtttgttggaggaaacaccatggatgttcaaggtcatggcacacatgttgctggcacgattgcatcttatgggagtgtaagcggagtgatgcagagtgcgacactgatcccggtcaaagtgctcgataattctggcagcgggtccctttacggtattacgcaaggcatattgtatgccgccgacatcgatgcggacgtcattaacatgtctctgggtggaggtggctataatcagagcatggatgaggctgttcaaacagcagttgctctgggaaccattgtagtagcagcgactggcaatgatggtgcatcgtcgatcagttatcctgctgcctacagcagcgtcattgcggtgggatctgtgacgattaatcgtacacgatcctcgttttctaactatggatctgggcttgaagttatggcaccgggcagcaacatctacagtacgtatcctaattccagatatacatctttgagtggtacaagcatggctactccgcacgttgcgggcgtagctgggctcattcgcgcagccaacccagacatatctgtcgcgcaagcccgtcagattctgcgggataccgcgcaagaagcaggatcgttcacacaatacggctatggaatcgtcgatgctcatgccgccgttgttgctgcatccggtggtagcggcggc

SEQ ID NO: 840 - protein, 413 aa, synthetic construct
  REGION 1..413: note = Variant of serine peptidase from Bacillus sinesaloumensis
MADQASQANGNQDVIEGELIVSVEPKNGKPDVSIQSAQSVTGQEDVLKSKGFTIVDTLHVEDSSVKPLVSKNFNKKVVEKMGLVYLVQYSPDQFKSSNIAKKELRKELMDLGFKVRYISENYKMMAIEGTATLQAVHPNQNWHYNMIKAPEAWAITSGSSSVKVAVLDTGIDHNHPSLANFVNTNLGRSFVGGNTMDVQGHGTHVAGTIASYGSVSGVMQSATLIPVKVLDNSGSGSLYGITQGILYAADIDADVINMSLGGGGYNQSMDEAVQTAVALGTIVVAATGNDGASSISYPAAYSSVIAVGSVTINRTRSSFSNYGSGLEVMAPGSNIYSTYPNSRYTSLSGTSMATPHVAGVAGLIRAANPDISVAQARQILRDTAQEAGSFTQYGYGIVDAHAAVVAASGGSGG

SEQ ID NO: 841 - DNA, 1239 bp, synthetic construct
  misc_feature 1..1239: note = Variant of serine peptidase from Bacillus sinesaloumensis
  source 1..1239: mol_type = other DNA
atggcagatcaagctagtcaagctaatggaaaccaggacgtcattgaaggcgagctgatcgtttcagtggaaccgaagaacggtaaacctgatgtgagcattcaaagtgcacaatccgtaacagggcaggaagacgtccttaaatcgaaaggctttacgatcgttgataccttgcatgtagaggatagcagcgtcaagccactcgtctcgaagaatttcaataagaaagtggtggagaagatgggactggtgtatcttgttcaatactctccggaccagtttaaaagttccaacattgcgaagaaagaactcagaaaagaattgatggatctgggctttaaagtccgctatataagcgaaaattacaagatgatggcgatcgaaggtactgccactcttcaagcagtacaccctaaccaaaactggcattataatatgattaaagctccggaagcgtgggctattacgtctggatcctctagcgttaaagtagcagtcctggatacagggatcgaccataatcacccatccttggccaacttcgtgaatactaatcttggccggtcgtttgttggaggaaacaccatggatgttcaaggtcatggcacacatgttgctggcacgattgcatcttatgggagtgtaagcggagtgatgcagagtgcgacactgatcccggtcaaagtgctcgataattctggcagcgggtccctttacggtattacgcaaggcatattgtatgccgccgacatcgatgcggacgtcattaacatgtctctgggtggaggaggctataatcagagcatggatgaggctgttcaaacagcagttgctcagggaaccattgtagtagcagcgactggcaatgatggtgcatcgtcgatcagttatcctgctgcctacagcagcgtcattgcggtgggatctgtgacgattaatcgtacacgatcctcgttttctaactatggatctgggcttgaagttatggcaccgggcagcaacatctacagtacgtatcctaattccagatatacatctttgagtggtacaagcatggctactccgcacgttgcgggcgtagctgggctcattcgcgcagccaacccagacatatctgtcgcgcaagcccgtcagattctgcgggataccgcgcaagaagcaggatcgttcacatactacggctatggaatcgtcgatgctcatgccgccgttgttgctgcatccggtggtagcggcggc

SEQ ID NO: 842 - protein, 413 aa, synthetic construct
  REGION 1..413: note = Variant of serine peptidase from Bacillus sinesaloumensis
MADQASQANGNQDVIEGELIVSVEPKNGKPDVSIQSAQSVTGQEDVLKSKGFTIVDTLHVEDSSVKPLVSKNFNKKVVEKMGLVYLVQYSPDQFKSSNIAKKELRKELMDLGFKVRYISENYKMMAIEGTATLQAVHPNQNWHYNMIKAPEAWAITSGSSSVKVAVLDTGIDHNHPSLANFVNTNLGRSFVGGNTMDVQGHGTHVAGTIASYGSVSGVMQSATLIPVKVLDNSGSGSLYGITQGILYAADIDADVINMSLGGGGYNQSMDEAVQTAVAQGTIVVAATGNDGASSISYPAAYSSVIAVGSVTINRTRSSFSNYGSGLEVMAPGSNIYSTYPNSRYTSLSGTSMATPHVAGVAGLIRAANPDISVAQARQILRDTAQEAGSFTYYGYGIVDAHAAVVAASGGSGG

SEQ ID NO: 843 - DNA, 1239 bp, synthetic construct
  misc_feature 1..1239: note = Variant of serine peptidase from Bacillus sinesaloumensis
  source 1..1239: mol_type = other DNA
atggcagatcaagctagtcaagctaatggaaaccaggacgtcattgaaggcgagctgatcgtttcagtggaaccgaagaacggtaaacctgatgtgagcattcaaagtgcacaatccgtaacagggcaggaagacgtccttaaatcgaaaggctttacgatcgttgataccttgcatgtagaggatagcagcgtcaagccactcgtctcgaagaatttcaataagaaagtggtggagaagatgggactggtgtatcttgttcaatactctccggaccagtttaaaagttccaacattgcgaagaaagaactcagaaaagaattgatggatctgggctttaaagtccgctatataagcgaaaattacaagatgatggcgatcgaaggtactgccactcttcaagcagtacaccctaaccaaaactggcattataatatgattaaagctccggaagcgtgggctattacgtctggatcctctagcgttaaagtagcagtcctggatacagggatcgaccataatcacccatccttggccaacttcgtgaatactaatcttggccggtcgtttgttggaggaaacaccatggatgttcaaggtcatggcacacatgttgctggcacgattgcatcttatgggagtgtaagcggagtgatgcagagtgcgacactgatcccggtcaaagtgctcgataattctggcagcgggtccctttacggtattacgcaaggcatattgtatgccgccgacatcgatgcggacgtcattaacatgtctctgggtggaggtggctataatcagagcatggatgaggctgttcaaacagcagttgctaagggaaccattgtagtagcagcgactggcaatgatggtgcatcgtcgatcagttatcctgctgcctacagcagcgtcattgcggtgggatctgtgacgtccaatcgtacacgatcctcgttttctaactatggatctgggcttgaagttatggcaccgggcagcaacatctacagtacgtatcctaatggcagatatacatctttgagtggtacaagcatggctactccgcacgttgcgggcgtagctgggctcattcgcgcagccaacccagacatatctgtcgcgcaagcccgtcagattctgcgggataccgcgcaagaagcaggatcgttcacacaatacggctatggaatcgtcgatgctcatgccgccgttgttgctgcatccggtggtagcggcggc

SEQ ID NO: 844 - protein, 413 aa, synthetic construct
  REGION 1..413: note = Variant of serine peptidase from Bacillus sinesaloumensis
MADQASQANGNQDVIEGELIVSVEPKNGKPDVSIQSAQSVTGQEDVLKSKGFTIVDTLHVEDSSVKPLVSKNFNKKVVEKMGLVYLVQYSPDQFKSSNIAKKELRKELMDLGFKVRYISENYKMMAIEGTATLQAVHPNQNWHYNMIKAPEAWAITSGSSSVKVAVLDTGIDHNHPSLANFVNTNLGRSFVGGNTMDVQGHGTHVAGTIASYGSVSGVMQSATLIPVKVLDNSGSGSLYGITQGILYAADIDADVINMSLGGGGYNQSMDEAVQTAVAKGTIVVAATGNDGASSISYPAAYSSVIAVGSVTSNRTRSSFSNYGSGLEVMAPGSNIYSTYPNGRYTSLSGTSMATPHVAGVAGLIRAANPDISVAQARQILRDTAQEAGSFTQYGYGIVDAHAAVVAASGGSGG

SEQ ID NO: 845 - DNA, 1239 bp, synthetic construct
  misc_feature 1..1239: note = Variant of serine peptidase from Bacillus sinesaloumensis
  source 1..1239: mol_type = other DNA
atggcagatcaagctagtcaagctaatggaaaccaggacgtcattgaaggcgagctgatcgtttcagtggaaccgaagaacggtaaacctgatgtgagcattcaaagtgcacaatccgtaacagggcaggaagacgtccttaaatcgaaaggctttacgatcgttgataccttgcatgtagaggatagcagcgtcaagccactcgtctcgaagaatttcaataagaaagtggtggagaagatgggactggtgtatcttgttcaatactctccggaccagtttaaaagttccaacattgcgaagaaagaactcagaaaagaattgatggatctgggctttaaagtccgctatataagcgaaaattacaagatgatggcgatcgaaggtacagccactcttcaggcagtacaccctaaccaaaactggcattataatatgattaaagctccggaagcgtgggctattacgtctggatcctctagcgttaaagtagcagtcctggatacagggatcgaccataatcacccatccttggccaacttcgtgaatactaatcttggccggtcgtttgttggaggaaacaccatggatgttcaaggtcatggcacacatgttgctggcacgattgcatcttatgggagtgtaagcggagtgatgcagagtgcgacactgatcccggtcaaagtgctcgataattctggcagcgggtccctttacggtattacgcaaggcatattgtatgccgccgacatcgatgcggacgtcattaacatgtctctgggtggaggtggctataatcagagcatggatgaggctgttcaaacagcagttgctaagggaaccattgtagtagcagcgactggcaatgatggtgcatcgtcgatcagttatcctgctgcctacagcagcgtcattgcggtgggatctgtgacgtccaatcgtacacgatcctcgttttctaactatggatctgggcttgaagttatggcaccgggcagcaacatctacagtacgtatcctaatagcagatatacatctttgagtggtacaagcatggctactccgcacgttgcgggcgtagctgggctcattcgcgcagccaacccagacatatctgtcgcgcaagcccgtcagattctgcgggataccgcgcaagaagcaggatcgttcacatactacggctatggaatcgtcgatgctcatgccgccgttgttgctgcatccggtggtagcggcggc

SEQ ID NO: 846 - protein, 413 aa, synthetic construct
  REGION 1..413: note = Variant of serine peptidase from Bacillus sinesaloumensis
MADQASQANGNQDVIEGELIVSVEPKNGKPDVSIQSAQSVTGQEDVLKSKGFTIVDTLHVEDSSVKPLVSKNFNKKVVEKMGLVYLVQYSPDQFKSSNIAKKELRKELMDLGFKVRYISENYKMMAIEGTATLQAVHPNQNWHYNMIKAPEAWAITSGSSSVKVAVLDTGIDHNHPSLANFVNTNLGRSFVGGNTMDVQGHGTHVAGTIASYGSVSGVMQSATLIPVKVLDNSGSGSLYGITQGILYAADIDADVINMSLGGGGYNQSMDEAVQTAVAKGTIVVAATGNDGASSISYPAAYSSVIAVGSVTSNRTRSSFSNYGSGLEVMAPGSNIYSTYPNSRYTSLSGTSMATPHVAGVAGLIRAANPDISVAQARQILRDTAQEAGSFTYYGYGIVDAHAAVVAASGGSGG

SEQ ID NO: 847 - DNA, 1239 bp, synthetic construct
  misc_feature 1..1239: note = Variant of serine peptidase from Bacillus sinesaloumensis
  source 1..1239: mol_type = other DNA
atggcagatcaagctagtcaagctaatggaaaccaggacgtcattgaaggcgagctgatcgtttcagtggaaccgaagaacggtaaacctgatgtgagcattcaaagtgcacaatccgtaacagggcaggaagacgtccttaaatcgaaaggctttacgatcgttgataccttgcatgtagaggatagcagcgtcaagccactcgtctcgaagaatttcaataagaaagtggtggagaagatgggactggtgtatcttgttcaatactctccggaccagtttaaaagttccaacattgcgaagaaagaactcagaaaagaattgatggatctgggctttaaagtccgctatataagcgaaaattacaagatgatggcgatcacgggtactgccactcttcaagcagtacaccctaaccaaaactggcattataacatgattaaagctccggaagcgtgggctattacgtctggatcctctagcgttaaagtagcagtcctggatacagggatcgaccataatcacccatccttggccaacttcgtgaatactaatcttggccggtcgtttgttggaggaaacaccatggatgttcaaggtcatggcacacatgttgctggcacgattgcatcttatgggagtgtaagcggagtgatgcagagtgcgacactgatcccggtcaaagtgctcgataattctggcagcgggtccctttacggtattacgcaaggcatattgtatgccgccgacatcgatgcggacgtcattaacatgtctctgggtggaggtggctataatcagagcatggatgaggctgttcaaacagcagttgctcagggaaccattgtagtagcagcgactggcaatgatggtgcatcgtcgatcagttatcctgctgcctacagcagcgtcattgcggtgggatctgtgacgtccaatcgtacacgatcctcgttttctaactatggatctgggcttgaagttatggcaccgggcagcaacatctacagtacgtatcctaatggcagatatacatctttgagtggtacaagcatggctactccgcacgttgcgggcgtagctgggctcattcgcgcagccaacccagacatatctgtcgcgcaagcccgtcagattctgcgggataccgcgcaagaagcaggatcgttcacacaatacggctatggaatcgtcgatgctcatgccgccgttgttgctgcatccggtggtagcggcggc

SEQ ID NO: 848 - protein, 413 aa, synthetic construct
  REGION 1..413: note = Variant of serine peptidase from Bacillus sinesaloumensis
MADQASQANGNQDVIEGELIVSVEPKNGKPDVSIQSAQSVTGQEDVLKSKGFTIVDTLHVEDSSVKPLVSKNFNKKVVEKMGLVYLVQYSPDQFKSSNIAKKELRKELMDLGFKVRYISENYKMMAITGTATLQAVHPNQNWHYNMIKAPEAWAITSGSSSVKVAVLDTGIDHNHPSLANFVNTNLGRSFVGGNTMDVQGHGTHVAGTIASYGSVSGVMQSATLIPVKVLDNSGSGSLYGITQGILYAADIDADVINMSLGGGGYNQSMDEAVQTAVAQGTIVVAATGNDGASSISYPAAYSSVIAVGSVTSNRTRSSFSNYGSGLEVMAPGSNIYSTYPNGRYTSLSGTSMATPHVAGVAGLIRAANPDISVAQARQILRDTAQEAGSFTQYGYGIVDAHAAVVAASGGSGG

SEQ ID NO: 849 - DNA, 1239 bp, synthetic construct
  misc_feature 1..1239: note = Variant of serine peptidase from Bacillus sinesaloumensis
  source 1..1239: mol_type = other DNA
atggcagatcaagctagtcaagctaatggaaaccaggacgtcattgaaggcgagctgatcgtttcagtggaaccgaagaacggtaaacctgatgtgagcattcaaagtgcacaatccgtaacagggcaggaagacgtccttaaatcgaaaggctttacgatcgttgataccttgcatgtagaggatagcagcgtcaagccactcgtctcgaagaatttcaataagaaagtggtggagaagatgggactggtgtatcttgttcaatactctccggaccagtttaaaagttccaacattgcgaagaaagaactcagaaaagaattgatggatctgggctttaaagtccgctatataagcgaaaattacaagatgatggcgatcgaaggtacagccactcttcaggcagtacaccctaaccaaaactggcattataatatgattaaagctccggaagcgtgggctattacgtctggatcctctagcgttaaagtagcagtcctggatacagggatcgaccataatcacccatccttggccaacttcgtgaatactaatcttggccggtcgtttgttggaggaaacaccatggatgttcaaggtcatggcacacatgttgctggcacgattgcatcttatgggagtgtaagcggagtgatgcagagtgcgacactgatcccggtcaaagtgctcgataattctggcagcgggtccctttacggtattacgcaaggcatattgtatgccgccgacatcgatgcggacgtcattaacatgtctctgggtggaggaggctataatcagagcatggatgaggctgttcaaacagcagttgctcagggaaccattgtagtagcagcgactggcaatgatggtgcatcgtcgatcagttatcctgctgcctacagcagcgtcattgcggtgggatctgtgacgtccaatcgtacacgatcctcgttttctaactatggatctgggcttgaagttatggcaccgggcagcaacatctacagtacgtatcctaatggcagatatacatctttgagtggtacaagcatggctactccgcacgttgcgggcgtagctgggctcattcgcgcagccaacccagacatatctgtcgcgcaagcccgtcagattctgcgggataccgcgcaagaagcaggatcgttcacacaatacggctatggaatcgtcgatgctcatgccgccgttgttgctgcatccggtggtagcggcggc

SEQ ID NO: 850 - protein, 413 aa, synthetic construct; identical to SEQ ID NO: 450
  REGION 1..413: note = Variant of serine peptidase from Bacillus sinesaloumensis

SEQ ID NO: 851 - DNA, 1239 bp, synthetic construct
  misc_feature 1..1239: note = Variant of serine peptidase from Bacillus sinesaloumensis
  source 1..1239: mol_type = other DNA
atggcagatcaagctagtcaagctaatggaaaccaggacgtcattgaaggcgagctgatcgtttcagtggaaccgaagaacggtaaacctgatgtgagcattcaaagtgcacaatccgtaacagggcaggaagacgtccttaaatcgaaaggctttacgatcgttgataccttgcatgtagaggatagcagcgtcaagccactcgtctcgaagaatttcaataagaaagtggtggagaagatgggactggtgtatcttgttcaatactctccggaccagtttaaaagttccaacattgcgaagaaagaactcagaaaagaattgatggatctgggctttaaagtccgctatataagcgaaaattacaagatgatggcgatcgaaggtacagccactcttcaggcagtacaccctaaccaaaactggcattataacatgattaaagctccggaagcgtgggctattacgtctggatcctctagcgttaaagtagcagtcctggatacagggatcgaccataatcacccatccttggccaacttcgtgaatactaatcttggccggtcgtttgttggaggaaacaccatggatgttcaaggtcatggcacacatgttgctggcacgattgcatcttatgggagtgtaagcggagtgatgcagagtgcgacactgatcccggtcaaagtgctcgataattctggcagcgggtccctttacggtattacgcaaggcatattgtatgccgccgacatcgatgcggacgtcattaacatgtctctgggtggaagtggctataatcagagcatggatgaggctgttcaaacagcagttgctcagggaaccattgtagtagcagcgactggcaatgatggtgcatcgtcgatcagttatcctgctgcctacagcagcgtcattgcggtgggatctgtgacgagtaatcgtacacgatcctcgttttctaactatggatctgggcttgaagttatggcaccgggcagcaacatctacagtacgtatcctaattccagatatacatctttgagtggtacaagcatggctactccgcacgttgcgggcgtagctgggctcattcgcgcagccaacccagacatatctgtcgcgcaagcccgtcagattctgcgggataccgcgcaagaagcaggatcgttcacacagtacggctatggaatcgtcgatgctcatgccgccgttgttgctgcatccggtggtagcggcggc

SEQ ID NO: 852 - protein, 413 aa, synthetic construct; identical to SEQ ID NO: 480
  REGION 1..413: note = Variant of serine peptidase from Bacillus sinesaloumensis

SEQ ID NO: 853 - DNA, 1239 bp, synthetic construct
  misc_feature 1..1239: note = Variant of serine peptidase from Bacillus sinesaloumensis
  source 1..1239: mol_type = other DNA
atggcagatcaagctagtcaagctaatggaaaccaggacgtcattgaaggcgagctgatcgtttcagtggaaccgaagaacggtaaacctgatgtgagcattcaaagtgcacaatccgtaacagggcaggaagacgtccttaaatcgaaaggctttacgatcgttgataccttgcatgtagaggatagcagcgtcaagccactcgtctcgaagaatttcaataagaaagtggtggagaagatgggactggtgtatcttgttcaatactctccggaccagtttaaaagttccaacattgcgaagaaagaactcagaaaagaattgatggatctgggctttaaagtccgctatataagcgaaaattacaagatgatggcgatcgaaggtacagccactcttcaggcagtacacccttgtcaaaactggcattataatatgattaaagctccggaagcgtgggctattacgtctggatcctctagcgttaaagtagcagtcctggatacagggatcgaccataatcacccatccttggccaacttcgtgaatactaatcttggccggtcgtttgttggaggaaacaccatggatgttcaaggtcatggcacacatgttgctggcacgattgcatcttatgggagtgtaagcggagtgatgcagagtgcgacactgatcccggtcaaagtgctcgataattctggcagcgggtccctttacggtattacgcaaggcatattgtatgccgccgacatcgatgcggacgtcattaacatgtctctgggtggaggaggctataatcagagcatggatgaggctgttcaaacagcagttgctcagggaaccattgtagtagcagcgactggcaatgatggtgcatcgtcgatcagttatcctgctgcctacagcagcgtcattgcggtgggatctgtgacgtccaatcgtacacgatcctcgttttctaactatggatctgggcttgaagttatggcaccgggcagcaacatctacagtacgtatcctaattccagatatacatctttgagtggtacaagcatggctactccgcacgttgcgggcgtagctgggctcattcgcgcagccaacccagacatatctgtcgcgcaagcccgtcagattctgcgggataccgcgcaagaagcaggatcgttcacacagtacggctatggaatcgtcgatgctcatgccgccgttgttgctgcatccggtggtagcggcggc

SEQ ID NO: 854 - protein, 413 aa, synthetic construct
  REGION 1..413: note = Variant of serine peptidase from Bacillus sinesaloumensis
MADQASQANGNQDVIEGELIVSVEPKNGKPDVSIQSAQSVTGQEDVLKSKGFTIVDTLHVEDSSVKPLVSKNFNKKVVEKMGLVYLVQYSPDQFKSSNIAKKELRKELMDLGFKVRYISENYKMMAIEGTATLQAVHPCQNWHYNMIKAPEAWAITSGSSSVKVAVLDTGIDHNHPSLANFVNTNLGRSFVGGNTMDVQGHGTHVAGTIASYGSVSGVMQSATLIPVKVLDNSGSGSLYGITQGILYAADIDADVINMSLGGGGYNQSMDEAVQTAVAQGTIVVAATGNDGASSISYPAAYSSVIAVGSVTSNRTRSSFSNYGSGLEVMAPGSNIYSTYPNSRYTSLSGTSMATPHVAGVAGLIRAANPDISVAQARQILRDTAQEAGSFTQYGYGIVDAHAAVVAASGGSGG

SEQ ID NO: 855 - DNA, 1239 bp, synthetic construct
  misc_feature 1..1239: note = Variant of serine peptidase from Bacillus sinesaloumensis
  source 1..1239: mol_type = other DNA
atggcagatcaagctagtcaagctaatggaaaccaggacgtcattgaaggcgagctgatcgtttcagtggaaccgaagaacggtaaacctgatgtgagcattcaaagtgcacaatccgtaacagggcaggaagacgtccttaaatcgaaaggctttacgatcgttgataccttgcatgtagaggatagcagcgtcaagccactcgtctcgaagaatttcaataagaaagtggtggagaagatgggactggtgtatcttgttcaatactctccggaccagtttaaaagttccaacattgcgaagaaagaactcagaaaagaattgatggatctgggctttaaagtccgctatataagcgaaaattacaagatgatggcgatcgaaggtacagccactcttcaggcagtacaccctaaccaaaactggcattataatatgattaaagctccggaagcgtgggctattacgtctggatcctctagcgttaaagtagcagtcctggatacagggatcgaccataatcacccatccttggccaacttcgtgaatactaatcttggccggtcgtttgttggaggaaacaccatggatgttcaaggtcatggcacacatgttgctggcacgattgcatcttatgggagtgtaagcggagtgatgcagagtgcgacactgatcccggtcaaagtgctcgataattctggcagcgggtccctttacggtattacgcaaggcatattgtatgccgccgacatcgatgcggacgtcattaacatgtctctgggtggaggaggctataatcagagcatggatgaggctgttcaaacagcagttgctcagggaaccattgtagtagcagcgactggcaatgatggtgcatcgtcgatcagttatcctgctgcctacagcagcgtcattgcggtgggatctgtgacgtccaatcgtacacgatcctcgttttctaactatggatctgggcttgaagttatggcaccgggcagcaacatctacagtacgtatcctaattccagatatcgttctttgagtggtacaagcatggctactccgcacgttgcgggcgtagctgggctcattcgcgcagccaacccagacatatctgtcgcgcaagcccgtcagattctgcgggataccgcgcaagaagcaggatcgttcacacagtacggctatggaatcgtcgatgctcatgccgccgttgttgctgcatccggtggtagcggcggc

SEQ ID NO: 856 - protein, 413 aa, synthetic construct
  REGION 1..413: note = Variant of serine peptidase from Bacillus sinesaloumensis
MADQASQANGNQDVIEGELIVSVEPKNGKPDVSIQSAQSVTGQEDVLKSKGFTIVDTLHVEDSSVKPLVSKNFNKKVVEKMGLVYLVQYSPDQFKSSNIAKKELRKELMDLGFKVRYISENYKMMAIEGTATLQAVHPNQNWHYNMIKAPEAWAITSGSSSVKVAVLDTGIDHNHPSLANFVNTNLGRSFVGGNTMDVQGHGTHVAGTIASYGSVSGVMQSATLIPVKVLDNSGSGSLYGITQGILYAADIDADVINMSLGGGGYNQSMDEAVQTAVAQGTIVVAATGNDGASSISYPAAYSSVIAVGSVTSNRTRSSFSNYGSGLEVMAPGSNIYSTYPNSRYRSLSGTSMATPHVAGVAGLIRAANPDISVAQARQILRDTAQEAGSFTQYGYGIVDAHAAVVAASGGSGG

SEQ ID NO: 857 - DNA, 1239 bp, synthetic construct
  misc_feature 1..1239: note = Variant of serine peptidase from Bacillus sinesaloumensis
  source 1..1239: mol_type = other DNA
atggcagatcaagctagtcaagctaatggaaaccaggacgtcattgaaggcgagctgatcgtttcagtggaaccgaagaacggtaaacctgatgtgagcattcaaagtgcacaatccgtaacagggcaggaagacgtccttaaatcgaaaggctttacgatcgttgataccttgcatgtagaggatagcagcgtcaagccactcgtctcgaagaatttcaataagaaagtggtggagaagatgggactggtgtatcttgttcaatactctccggaccagtttaaaagttccaacattgcgaagaaagaactcagaaaagaattgatggatctgggctttaaagtccgctatataagcgaaaattacaagatgatggcgatcgaaggtacagccactcttcaggcagtacaccctaaccaaaactggcattataatatgattaaagctccggaagcgtgggctattacgtctggatcctctagcgttaaagtagcagtcctggatacagggatcgaccataatcacccatccttggccaacttcgtgaatactaatcttggccggtcgtttgttggaggaaacaccatggatgttcaaggtcatggcacacatgttgctggcacgattgcatcttatgggagtgtaagcggagtgatgcagagtgcgacactgatcccggtcaaagtgctcgataattctggcagcgggtccctttacggtattacgttgggcatattgtatgccgccgacatcgatgcggacgtcattaacatgtctctgggtggaggaggctataatcagagcatggatgaggctgttcaaacagcagttgctcagggaaccattgtagtagcagcgactggcaatgatggtgcatcgtcgatcagttatcctgctgcctacagcagcgtcattgcggtgggatctgtgacgtccaatcgtacacgatcctcgttttctaactatggatctgggcttgaagttatggcaccgggcagcaacatctacagtacgtatcctaattccagatatacatctttgagtggtacaagcatggctactccgcacgttgcgggcgtagctgggctcattcgcgcagccaacccagacatatctgtcgcgcaagcccgtcagattctgcgggataccgcgcaagaagcaggatcgttcacacagtacggctatggaatcgtcgatgctcatgccgccgttgttgctgcatccggtggtagcggcggc

SEQ ID NO: 858 - protein, 413 aa, synthetic construct
  REGION 1..413: note = Variant of serine peptidase from Bacillus sinesaloumensis
MADQASQANGNQDVIEGELIVSVEPKNGKPDVSIQSAQSVTGQEDVLKSKGFTIVDTLHVEDSSVKPLVSKNFNKKVVEKMGLVYLVQYSPDQFKSSNIAKKELRKELMDLGFKVRYISENYKMMAIEGTATLQAVHPNQNWHYNMIKAPEAWAITSGSSSVKVAVLDTGIDHNHPSLANFVNTNLGRSFVGGNTMDVQGHGTHVAGTIASYGSVSGVMQSATLIPVKVLDNSGSGSLYGITLGILYAADIDADVINMSLGGGGYNQSMDEAVQTAVAQGTIVVAATGNDGASSISYPAAYSSVIAVGSVTSNRTRSSFSNYGSGLEVMAPGSNIYSTYPNSRYTSLSGTSMATPHVAGVAGLIRAANPDISVAQARQILRDTAQEAGSFTQYGYGIVDAHAAVVAASGGSGG

SEQ ID NO: 859 - DNA, 1239 bp, synthetic construct
  misc_feature 1..1239: note = Variant of serine peptidase from Bacillus sinesaloumensis
  source 1..1239: mol_type = other DNA
atggcagatcaagctagtcaagctaatggaaaccaggacgtcattgaaggcgagctgatcgtttcagtggaaccgaagaacggtaaacctgatgtgagcattcaaagtgcacaatccgtaacagggcaggaagacgtccttaaatcgaaaggctttacgatcgttgataccttgcatgtagaggatagcagcgtcaagccactcgtctcgaagaatttcaataagaaagtggtggagaagatgggactggtgtatcttgttcaatactctccggaccagtttaaaagttccaacattgcgaagaaagaactcagaaaagaattgatggatctgggctttaaagtccgctatataagcgaaaattacaagatgatggcgatcgaaggtacagccactcttcaggcagtacaccctaaccaaaactgggcgtataatatgattaaagctccggaagcgtgggctattacgtctggatcctctagcgttaaagtagcagtcctggatacagggatcgaccataatcacccatccttggccaacttcgtgaatactaatcttggccggtcgtttgttggaggaaacaccatggatgttcaaggtcatggcacacatgttgctggcacgattgcatcttatgggagtgtaagcggagtgatgcagagtgcgacactgatcccggtcaaagtgctcgataattctggcagcgggtccctttacggtattacgcaaggcatattgtatgccgccgacatcgatgcggacgtcattaacatgtctctgggtggaggaggctataatcagagcatggatgaggctgttcaaacagcagttgctcagggaaccattgtagtagcagcgactggcaatgatggtgcatcgtcgatcagttatcctgctgcctacagcagcgtcattgcggtgggatctgtgacgtccaatcgtacacgatcctcgttttctaactatggatctgggcttgaagttatggcaccgggcagcaacatctacagtacgtatcctaattccagatatacatctttgagtggtacaagcatggctactccgcacgttgcgggcgtagctgggctcattcgcgcagccaacccagacatatctgtcgcgcaagcccgtcagattctgcgggataccgcgcaagaagcaggatcgttcacacagtacggctatggaatcgtcgatgctcatgccgccgttgttgctgcatccggtggtagcggcggc

SEQ ID NO: 860 - protein, 413 aa, synthetic construct
  REGION 1..413: note = Variant of serine peptidase from Bacillus sinesaloumensis
MADQASQANGNQDVIEGELIVSVEPKNGKPDVSIQSAQSVTGQEDVLKSKGFTIVDTLHVEDSSVKPLVSKNFNKKVVEKMGLVYLVQYSPDQFKSSNIAKKELRKELMDLGFKVRYISENYKMMAIEGTATLQAVHPNQNWAYNMIKAPEAWAITSGSSSVKVAVLDTGIDHNHPSLANFVNTNLGRSFVGGNTMDVQGHGTHVAGTIASYGSVSGVMQSATLIPVKVLDNSGSGSLYGITQGILYAADIDADVINMSLGGGGYNQSMDEAVQTAVAQGTIVVAATGNDGASSISYPAAYSSVIAVGSVTSNRTRSSFSNYGSGLEVMAPGSNIYSTYPNSRYTSLSGTSMATPHVAGVAGLIRAANPDISVAQARQILRDTAQEAGSFTQYGYGIVDAHAAVVAASGGSGG

SEQ ID NO: 861 - DNA, 1239 bp, synthetic construct
  misc_feature 1..1239: note = Variant of serine peptidase from Bacillus sinesaloumensis
  source 1..1239: mol_type = other DNA
atggcagatcaagctagtcaagctaatggaaaccaggacgtcattgaaggcgagctgatcgtttcagtggaaccgaagaacggtaaacctgatgtgagcattcaaagtgcacaatccgtaacagggcaggaagacgtccttaaatcgaaaggctttacgatcgttgataccttgcatgtagaggatagcagcgtcaagccactcgtctcgaagaatttcaataagaaagtggtggagaagatgggactggtgtatcttgttcaatactctccggaccagtttaaaagttccaacattgcgaagaaagaactcagaaaagaattgatggatctgggctttaaagtccgctatataagcgaaaattacaagatgatggcgatcgaaggtacagccactcttcaggcagtacaccctaaccaaaactggcattataatatgattaaagctccggaagcgtgggctattacgtctggatcctctagcgttaaagtagcagtcctggatacagggatcgaccataatcacccatccttggccaacttcgtgaatactaatcttggccggtcgtttgttggaggaaacaccatggatgttcaaggtcatggcacacatgttgctggcacgattgcatcttatgggagtgtaagcggagtgatgcagagtgcgacactgatcccggtcaaagtgctcgataattctggcagcgggtccctttacggtattacgcaaggcatattgtatgcctcggacatcgatgcggacgtcattaacatgtctctgggtggaggaggctataatcagagcatggatgaggctgttcaaacagcagttgctcagggaaccattgtagtagcagcgactggcaatgatggtgcatcgtcgatcagttatcctgctgcctacagcagcgtcattgcggtgggatctgtgacgtccaatcgtacacgatcctcgttttctaactatggatctgggcttgaagttatggcaccgggcagcaacatctacagtacgtatcctaattccagatatacatctttgagtggtacaagcatggctactccgcacgttgcgggcgtagctgggctcattcgcgcagccaacccagacatatctgtcgcgcaagcccgtcagattctgcgggataccgcgcaagaagcaggatcgttcacacagtacggctatggaatcgtcgatgctcatgccgccgttgttgctgcatccggtggtagcggcggc

SEQ ID NO: 862 - protein, 413 aa, synthetic construct
  REGION 1..413: note = Variant of serine peptidase from Bacillus sinesaloumensis
MADQASQANGNQDVIEGELIVSVEPKNGKPDVSIQSAQSVTGQEDVLKSKGFTIVDTLHVEDSSVKPLVSKNFNKKVVEKMGLVYLVQYSPDQFKSSNIAKKELRKELMDLGFKVRYISENYKMMAIEGTATLQAVHPNQNWHYNMIKAPEAWAITSGSSSVKVAVLDTGIDHNHPSLANFVNTNLGRSFVGGNTMDVQGHGTHVAGTIASYGSVSGVMQSATLIPVKVLDNSGSGSLYGITQGILYASDIDADVINMSLGGGGYNQSMDEAVQTAVAQGTIVVAATGNDGASSISYPAAYSSVIAVGSVTSNRTRSSFSNYGSGLEVMAPGSNIYSTYPNSRYTSLSGTSMATPHVAGVAGLIRAANPDISVAQARQILRDTAQEAGSFTQYGYGIVDAHAAVVAASGGSGG

SEQ ID NO: 863 - DNA, 1239 bp, synthetic construct
  misc_feature 1..1239: note = Variant of serine peptidase from Bacillus sinesaloumensis
  source 1..1239: mol_type = other DNA
atggcagatcaagctagtcaagctaatggaaaccaggacgtcattgaaggcgagctgatcgtttcagtggaaccgaagaacggtaaacctgatgtgagcattcaaagtgcacaatccgtaacagggcaggaagacgtccttaaatcgaaaggctttacgatcgttgataccttgcatgtagaggatagcagcgtcaagccactcgtctcgaagaatttcaataagaaagtggtggagaagatgggactggtgtatcttgttcaatactctccggaccagtttaaaagttccaacattgcgaagaaagaactcagaaaagaattgatggatctgggctttaaagtccgctatataagcgaaaattacaagatgatggcgatcgaaggtacagccactcttcaggcagtacaccctaaccaaaactggcattataatatgattaaagctccggaagcgtgggctattacgtctggatcctctagcgttaaagtagcagtcctggatacagggatcgaccataatcacccatccttggccaacttcgtgaatactaatcttggccggtcgtttgttggaggaaacaccatggatgttcaaggtcatggcacacatgttgctggcacgattgcatcttatgggagtgtaagcggagtgatgcagagtgcgacactgatcccggtcaaagtgctcgataattctggcagcgggtccctttacggtattacgcaaggcatattgtatgccgccgacatcgatgcggacgtcattaacatgtctctgggttctggaggctataatcagagcatggatgaggctgttcaaacagcagttgctcagggaaccattgtagtagcagcgactggcaatgatggtgcatcgtcgatcagttatcctgctgcctacagcagcgtcattgcggtgggatctgtgacgtccaatcgtacacgatcctcgttttctaactatggatctgggcttgaagttatggcaccgggcagcaacatctacagtacgtatcctaattccagatatacatctttgagtggtacaagcatggctactccgcacgttgcgggcgtagctgggctcattcgcgcagccaacccagacatatctgtcgcgcaagcccgtcagattctgcgggataccgcgcaagaagcaggatcgttcacacagtacggctatggaatcgtcgatgctcatgccgccgttgttgctgcatccggtggtagcggcggc

SEQ ID NO: 864 - protein, 413 aa, synthetic construct
  REGION 1..413: note = Variant of serine peptidase from Bacillus sinesaloumensis
MADQASQANGNQDVIEGELIVSVEPKNGKPDVSIQSAQSVTGQEDVLKSKGFTIVDTLHVEDSSVKPLVSKNFNKKVVEKMGLVYLVQYSPDQFKSSNIAKKELRKELMDLGFKVRYISENYKMMAIEGTATLQAVHPNQNWHYNMIKAPEAWAITSGSSSVKVAVLDTGIDHNHPSLANFVNTNLGRSFVGGNTMDVQGHGTHVAGTIASYGSVSGVMQSATLIPVKVLDNSGSGSLYGITQGILYAADIDADVINMSLGSGGYNQSMDEAVQTAVAQGTIVVAATGNDGASSISYPAAYSSVIAVGSVTSNRTRSSFSNYGSGLEVMAPGSNIYSTYPNSRYTSLSGTSMATPHVAGVAGLIRAANPDISVAQARQILRDTAQEAGSFTQYGYGIVDAHAAVVAASGGSGG

SEQ ID NO: 865 - DNA, 1239 bp, synthetic construct
  misc_feature 1..1239: note = Variant of serine peptidase from Bacillus sinesaloumensis
  source 1..1239: mol_type = other DNA
atggcagatcaagctagtcaagctaatggaaaccaggacgtcattgaaggcgagctgatcgtttcagtggaaccgaagaacggtaaacctgatgtgagcattcaaagtgcacaatccgtaacagggcaggaagacgtccttaaatcgaaaggctttacgatcgttgataccttgcatgtagaggatagcagcgtcaagccactcgtctcgaagaatttcaataagaaagtggtggagaagatgggactggtgtatcttgttcaatactctccggaccagtttaaaagttccaacattgcgaagaaagaactcagaaaagaattgatggatctgggctttaaagtccgctatataagcgaaaattacaagatgatggcgatcgaaggtacagccactcttcaggcagtacaccctaggcaaaactggcattataatatgattaaagctccggaagcgtgggctattacgtctggatcctctagcgttaaagtagcagtcctggatacagggatcgaccataatcacccatccttggccaacttcgtgaatactaatcttggccggtcgtttgttggaggaaacaccatggatgttcaaggtcatggcacacatgttgctggcacgattgcatcttatgggagtgtaagcggagtgatgcagagtgcgacactgatcccggtcaaagtgctcgataattctggcagcgggtccctttacggtattacgcaaggcatattgtatgccgccgacatcgatgcggacgtcattaacatgtctctgggtggaggaggctataatcagagcatggatgaggctgttcaaacagcagttgctcagggaaccattgtagtagcagcgactggcaatgatggtgcatcgtcgatcagttatcctgctgcctacagcagcgtcattgcggtgggatctgtgacgtccaatcgtacacgatcctcgttttctaactatggatctgggcttgaagttatggcaccgggcagcaacatctacagtacgtatcctaattccagatatacatctttgagtggtacaagcatggctactccgcacgttgcgggcgtagctgggctcattcgcgcagccaacccagacatatctgtcgcgcaagcccgtcagattctgcgggataccgcgcaagaagcaggatcgttcacacagtacggctatggaatcgtcgatgctcatgccgccgttgttgctgcatccggtggtagcggcggc

SEQ ID NO: 866 - protein, 413 aa, synthetic construct
  REGION 1..413: note = Variant of serine peptidase from Bacillus sinesaloumensis
MADQASQANGNQDVIEGELIVSVEPKNGKPDVSIQSAQSVTGQEDVLKSKGFTIVDTLHVEDSSVKPLVSKNFNKKVVEKMGLVYLVQYSPDQFKSSNIAKKELRKELMDLGFKVRYISENYKMMAIEGTATLQAVHPRQNWHYNMIKAPEAWAITSGSSSVKVAVLDTGIDHNHPSLANFVNTNLGRSFVGGNTMDVQGHGTHVAGTIASYGSVSGVMQSATLIPVKVLDNSGSGSLYGITQGILYAADIDADVINMSLGGGGYNQSMDEAVQTAVAQGTIVVAATGNDGASSISYPAAYSSVIAVGSVTSNRTRSSFSNYGSGLEVMAPGSNIYSTYPNSRYTSLSGTSMATPHVAGVAGLIRAANPDISVAQARQILRDTAQEAGSFTQYGYGIVDAHAAVVAASGGSGG

SEQ ID NO: 867 - DNA, 1239 bp, synthetic construct
  misc_feature 1..1239: note = Variant of serine peptidase from Bacillus sinesaloumensis
  source 1..1239: mol_type = other DNA
atggcagatcaagctagtcaagctaatggaaaccaggacgtcattgaaggcgagctgatcgtttcagtggaaccgaagaacggtaaacctgatgtgagcattcaaagtgcacaatccgtaacagggcaggaagacgtccttaaatcgaaaggctttacgatcgttgataccttgcatgtagaggatagcagcgtcaagccactcgtctcgaagaatttcaataagaaagtggtggagaagatgggactggtgtatcttgttcaatactctccggaccagtttaaaagttccaacattgcgaagaaagaactcagaaaagaattgatggatctgggctttaaagtccgctatataagcgaaaattacaagatgatggcgatcgaaggtacagccactcttcaggcagtacaccctaaccaaaactggcattataatatgattaaagctccggaagcgtgggctattacgtctggatcctctagcgttaaagtagcagtcctggatacagggatcgaccataatcacccatccttggccaacttcgtgaatactaatcttggccggtcgtttgttggaggaaacaccatggatgttcaaggtcatggcacacatgttgctggcacgattgcatcttatgggagtgtaagcggagtgatgcagagtgcgacactgatcccggtcaaagtgctcgataattctggcagcgggtccctttacggtattacgcaaggcatattgtatgccgccgacatcgatgcggacgtcattaacatgtctctgggtggaggaggctataatcagagccaggatgaggctgttcaaacagcagttgctcagggaaccattgtagtagcagcgactggcaatgatggtgcatcgtcgatcagttatcctgctgcctacagcagcgtcattgcggtgggatctgtgacgtccaatcgtacacgatcctcgttttctaactatggatctgggcttgaagttatggcaccgggcagcaacatctacagtacgtatcctaattccagatatacatctttgagtggtacaagcatggctactccgcacgttgcgggcgtagctgggctcattcgcgcagccaacccagacatatctgtcgcgcaagcccgtcagattctgcgggataccgcgcaagaagcaggatcgttcacacagtacggctatggaatcgtcgatgctcatgccgccgttgttgctgcatccggtggtagcggcggc

SEQ ID NO: 868 - protein, 413 aa, synthetic construct
  REGION 1..413: note = Variant of serine peptidase from Bacillus sinesaloumensis
MADQASQANGNQDVIEGELIVSVEPKNGKPDVSIQSAQSVTGQEDVLKSKGFTIVDTLHVEDSSVKPLVSKNFNKKVVEKMGLVYLVQYSPDQFKSSNIAKKELRKELMDLGFKVRYISENYKMMAIEGTATLQAVHPNQNWHYNMIKAPEAWAITSGSSSVKVAVLDTGIDHNHPSLANFVNTNLGRSFVGGNTMDVQGHGTHVAGTIASYGSVSGVMQSATLIPVKVLDNSGSGSLYGITQGILYAADIDADVINMSLGGGGYNQSQDEAVQTAVAQGTIVVAATGNDGASSISYPAAYSSVIAVGSVTSNRTRSSFSNYGSGLEVMAPGSNIYSTYPNSRYTSLSGTSMATPHVAGVAGLIRAANPDISVAQARQILRDTAQEAGSFTQYGYGIVDAHAAVVAASGGSGG

SEQ ID NO: 869 - DNA, 1239 bp, synthetic construct
  misc_feature 1..1239: note = Variant of serine peptidase from Bacillus sinesaloumensis
  source 1..1239: mol_type = other DNA
atggcagatcaagctagtcaagctaatggaaaccaggacgtcattgaaggcgagctgatcgtttcagtggaaccgaagaacggtaaacctgatgtgagcattcaaagtgcacaatccgtaacagggcaggaagacgtccttaaatcgaaaggctttacgatcgttgataccttgcatgtagaggatagcagcgtcaagccactcgtctcgaagaatttcaataagaaagtggtggagaagatgggactggtgtatcttgttcaatactctccggaccagtttaaaagttccaacattgcgaagaaagaactcagaaaagaattgatggatctgggctttaaagtccgctatataagcgaaaattacaagatgatggcgatcgaaggtacagccactcttcaggcagtacaccctaaccaaaactggcattataatatgattaaagctccggaagcgtgggctattacgtctggatcctctagcgttaaagtagcagtcctggatacagggatcgaccataatcacccatccttggccaacttcgtgaatactaatcttggccggtcgtttgttggaggaaacaccatggatgttcaaggtcatggcacacatgttgctggcacgattgcatcttatgggagtgtaagcggagtgatgcagagtgcgacactgatcccggtcaaagtgctcgataattctggcagcgggtccctttacggtattacgcaaggcatattgtatgccgccgacatcgatgcggacgtcattaacatgtctctgggtggaggaggctataatcagagcatggatgaggctgttcaaacagcagttgctcagggaaccattgtagtagcagcgactggcaatgatggtgcatcgtcgatcagttatcctgctgcctacagcagcgtcattgcggtgggatctgtgacgtccaatcgtacacgatcctcgttttctaactatggatctgggcttgaattgatggcaccgggcagcaacatctacagtacgtatcctaattccagatatacatctttgagtggtacaagcatggctactccgcacgttgcgggcgtagctgggctcattcgcgcagccaacccagacatatctgtcgcgcaagcccgtcagattctgcgggataccgcgcaagaagcaggatcgttcacacagtacggctatggaatcgtcgatgctcatgccgccgttgttgctgcatccggtggtagcggcggc

SEQ ID NO: 870 - protein, 413 aa, synthetic construct
  REGION 1..413: note = Variant of serine peptidase from Bacillus sinesaloumensis
MADQASQANGNQDVIEGELIVSVEPKNGKPDVSIQSAQSVTGQEDVLKSKGFTIVDTLHVEDSSVKPLVSKNFNKKVVEKMGLVYLVQYSPDQFKSSNIAKKELRKELMDLGFKVRYISENYKMMAIEGTATLQAVHPNQNWHYNMIKAPEAWAITSGSSSVKVAVLDTGIDHNHPSLANFVNTNLGRSFVGGNTMDVQGHGTHVAGTIASYGSVSGVMQSATLIPVKVLDNSGSGSLYGITQGILYAADIDADVINMSLGGGGYNQSMDEAVQTAVAQGTIVVAATGNDGASSISYPAAYSSVIAVGSVTSNRTRSSFSNYGSGLELMAPGSNIYSTYPNSRYTSLSGTSMATPHVAGVAGLIRAANPDISVAQARQILRDTAQEAGSFTQYGYGIVDAHAAVVAASGGSGG

SEQ ID NO: 871 - DNA, 1239 bp, synthetic construct
  misc_feature 1..1239: note = Variant of serine peptidase from Bacillus sinesaloumensis
  source 1..1239: mol_type = other DNA
atggcagatcaagctagtcaagctaatggaaaccaggacgtcattgaaggcgagctgatcgtttcagtggaaccgaagaacggtaaacctgatgtgagcattcaaagtgcacaatccgtaacagggcaggaagacgtccttaaatcgaaaggctttacgatcgttgataccttgcatgtagaggatagcagcgtcaagccactcgtctcgaagaatttcaataagaaagtggtggagaagatgggactggtgtatcttgttcaatactctccggaccagtttaaaagttccaacattgcgaagaaagaactcagaaaagaattgatggatctgggctttaaagtccgctatataagcgaaaattacaagatgatggcgatcgaaggtacagccactcttcaggcagtacaccctaaccaaaactggcattataatatgattaaagctccggaagcgtgggctattacggggggatcctctagcgttaaagtagcagtcctggatacagggatcgaccataatcacccatccttggccaacttcgtgaatactaatcttggccggtcgtttgttggaggaaacaccatggatgttcaaggtcatggcacacatgttgctggcacgattgcatcttatgggagtgtaagcggagtgatgcagagtgcgacactgatcccggtcaaagtgctcgataattctggcagcgggtccctttacggtattacgcaaggcatattgtatgccgccgacatcgatgcggacgtcattaacatgtctctgggtggaggaggctataatcagagcatggatgaggctgttcaaacagcagttgctcagggaaccattgtagtagcagcgactggcaatgatggtgcatcgtcgatcagttatcctgctgcctacagcagcgtcattgcggtgggatctgtgacgtccaatcgtacacgatcctcgttttctaactatggatctgggcttgaagttatggcaccgggcagcaacatctacagtacgtatcctaattccagatatacatctttgagtggtacaagcatggctactccgcacgttgcgggcgtagctgggctcattcgcgcagccaacccagacatatctgtcgcgcaagcccgtcagattctgcgggataccgcgcaagaagcaggatcgttcacacagtacggctatggaatcgtcgatgctcatgccgccgttgttgctgcatccggtggtagcggcggc

SEQ ID NO: 872 - protein, 413 aa, synthetic construct
  REGION 1..413: note = Variant of serine peptidase from Bacillus sinesaloumensis
MADQASQANGNQDVIEGELIVSVEPKNGKPDVSIQSAQSVTGQEDVLKSKGFTIVDTLHVEDSSVKPLVSKNFNKKVVEKMGLVYLVQYSPDQFKSSNIAKKELRKELMDLGFKVRYISENYKMMAIEGTATLQAVHPNQNWHYNMIKAPEAWAITGGSSSVKVAVLDTGIDHNHPSLANFVNTNLGRSFVGGNTMDVQGHGTHVAGTIASYGSVSGVMQSATLIPVKVLDNSGSGSLYGITQGILYAADIDADVINMSLGGGGYNQSMDEAVQTAVAQGTIVVAATGNDGASSISYPAAYSSVIAVGSVTSNRTRSSFSNYGSGLEVMAPGSNIYSTYPNSRYTSLSGTSMATPHVAGVAGLIRAANPDISVAQARQILRDTAQEAGSFTQYGYGIVDAHAAVVAASGGSGG

SEQ ID NO: 873 - DNA, 1239 bp, synthetic construct
  misc_feature 1..1239: note = Variant of serine peptidase from Bacillus sinesaloumensis
  source 1..1239: mol_type = other DNA
atggcagatcaagctagtcaagctaatggaaaccaggacgtcattgaaggcgagctgatcgtttcagtggaaccgaagaacggtaaacctgatgtgagcattcaaagtgcacaatccgtaacagggcaggaagacgtccttaaatcgaaaggctttacgatcgttgataccttgcatgtagaggatagcagcgtcaagccactcgtctcgaagaatttcaataagaaagtggtggagaagatgggactggtgtatcttgttcaatactctccggaccagtttaaaagttccaacattgcgaagaaagaactcagaaaagaattgatggatctgggctttaaagtccgctatataagcgaaaattacaagatgatggcgatcgaaggtacagccactcttcaggcagtacaccctaaccaaaactggcattataatatgattaaagctccggaagcgtgggctattgtgtctggatcctctagcgttaaagtagcagtcctggatacagggatcgaccataatcacccatccttggccaacttcgtgaatactaatcttggccggtcgtttgttggaggaaacaccatggatgttcaaggtcatggcacacatgttgctggcacgattgcatcttatgggagtgtaagcggagtgatgcagagtgcgacactgatcccggtcaaagtgctcgataattctggcagcgggtccctttacggtattacgcaaggcatattgtatgccgccgacatcgatgcggacgtcattaacatgtctctgggtggaggaggctataatcagagcatggatgaggctgttcaaacagcagttgctcagggaaccattgtagtagcagcgactggcaatgatggtgcatcgtcgatcagttatcctgctgcctacagcagcgtcattgcggtgggatctgtgacgtccaatcgtacacgatcctcgttttctaactatggatctgggcttgaagttatggcaccgggcagcaacatctacagtacgtatcctaattccagatatacatctttgagtggtacaagcatggctactccgcacgttgcgggcgtagctgggctcattcgcgcagccaacccagacatatctgtcgcgcaagcccgtcagattctgcgggataccgcgcaagaagcaggatcgttcacacagtacggctatggaatcgtcgatgctcatgccgccgttgttgctgcatccggtggtagcggcggc

SEQ ID NO: 874 - protein, 413 aa, synthetic construct
  REGION 1..413: note = Variant of serine peptidase from Bacillus sinesaloumensis
MADQASQANGNQDVIEGELIVSVEPKNGKPDVSIQSAQSVTGQEDVLKSKGFTIVDTLHVEDSSVKPLVSKNFNKKVVEKMGLVYLVQYSPDQFKSSNIAKKELRKELMDLGFKVRYISENYKMMAIEGTATLQAVHPNQNWHYNMIKAPEAWAIVSGSSSVKVAVLDTGIDHNHPSLANFVNTNLGRSFVGGNTMDVQGHGTHVAGTIASYGSVSGVMQSATLIPVKVLDNSGSGSLYGITQGILYAADIDADVINMSLGGGGYNQSMDEAVQTAVAQGTIVVAATGNDGASSISYPAAYSSVIAVGSVTSNRTRSSFSNYGSGLEVMAPGSNIYSTYPNSRYTSLSGTSMATPHVAGVAGLIRAANPDISVAQARQILRDTAQEAGSFTQYGYGIVDAHAAVVAASGGSGG

SEQ ID NO: 875 - DNA, 1239 bp, synthetic construct
  misc_feature 1..1239: note = Variant of serine peptidase from Bacillus sinesaloumensis
  source 1..1239: mol_type = other DNA
atggcagatcaagctagtcaagctaatggaaaccaggacgtcattgaaggcgagctgatcgtttcagtggaaccgaagaacggtaaacctgatgtgagcattcaaagtgcacaatccgtaacagggcaggaagacgtccttaaatcgaaaggctttacgatcgttgataccttgcatgtagaggatagcagcgtcaagccactcgtctcgaagaatttcaataagaaagtggtggagaagatgggactggtgtatcttgttcaatactctccggaccagtttaaaagttccaacattgcgaagaaagaactcagaaaagaattgatggatctgggctttaaagtccgctatataagcgaaaattacaagatgatggcgatcgaaggtacagccactcttcaggcagtacaccctaaccaaaactggcattataatatgattaaagctccggaagcgtgggctattacgtctggatcctctagcgttaaagtagcagtcctggatacagggatcgaccataatcacccatccttggccaacttcgtgaatactaatcttggccggtcgtttgttggaggaaacaccatggatgttcaaggtcatggcacacatgttgctggcacgattgcatcttatgggagtgtaagcggagtgatgcagagtgcgacactgatcccggtcaaagtgctcgataattctggcagcgggtccctttacggtatttctcaaggcatattgtatgccgccgacatcgatgcggacgtcattaacatgtctctgggtggaggaggctataatcagagcatggatgaggctgttcaaacagcagttgctcagggaaccattgtagtagcagcgactggcaatgatggtgcatcgtcgatcagttatcctgctgcctacagcagcgtcattgcggtgggatctgtgacgtccaatcgtacacgatcctcgttttctaactatggatctgggcttgaagttatggcaccgggcagcaacatctacagtacgtatcctaattccagatatacatctttgagtggtacaagcatggctactccgcacgttgcgggcgtagctgggctcattcgcgcagccaacccagacatatctgtcgcgcaagcccgtcagattctgcgggataccgcgcaagaagcaggatcgttcacacagtacggctatggaatcgtcgatgctcatgccgccgttgttgctgcatccggtggtagcggcggc

SEQ ID NO: 876 - protein, 413 aa, synthetic construct
  REGION 1..413: note = Variant of serine peptidase from Bacillus sinesaloumensis
MADQASQANGNQDVIEGELIVSVEPKNGKPDVSIQSAQSVTGQEDVLKSKGFTIVDTLHVEDSSVKPLVSKNFNKKVVEKMGLVYLVQYSPDQFKSSNIAKKELRKELMDLGFKVRYISENYKMMAIEGTATLQAVHPNQNWHYNMIKAPEAWAITSGSSSVKVAVLDTGIDHNHPSLANFVNTNLGRSFVGGNTMDVQGHGTHVAGTIASYGSVSGVMQSATLIPVKVLDNSGSGSLYGISQGILYAADIDADVINMSLGGGGYNQSMDEAVQTAVAQGTIVVAATGNDGASSISYPAAYSSVIAVGSVTSNRTRSSFSNYGSGLEVMAPGSNIYSTYPNSRYTSLSGTSMATPHVAGVAGLIRAANPDISVAQARQILRDTAQEAGSFTQYGYGIVDAHAAVVAASGGSGG

SEQ ID NO: 877 - DNA, 1239 bp, synthetic construct
  misc_feature 1..1239: note = Variant of serine peptidase from Bacillus sinesaloumensis
  source 1..1239: mol_type = other DNA
atggcagatcaagctagtcaagctaatggaaaccaggacgtcattgaaggcgagctgatcgtttcagtggaaccgaagaacggtaaacctgatgtgagcattcaaagtgcacaatccgtaacagggcaggaagacgtccttaaatcgaaaggctttacgatcgttgataccttgcatgtagaggatagcagcgtcaagccactcgtctcgaagaatttcaataagaaagtggtggagaagatgggactggtgtatcttgttcaatactctccggaccagtttaaaagttccaacattgcgaagaaagaactcagaaaagaattgatggatctgggctttaaagtccgctatataagcgaaaattacaagatgatggcgatcgaaggtacagccactcttcaggcagtacaccctttgcaaaactggcattataatatgattaaagctccggaagcgtgggctattacgtctggatcctctagcgttaaagtagcagtcctggatacagggatcgaccataatcacccatccttggccaacttcgtgaatactaatcttggccggtcgtttgttggaggaaacaccatggatgttcaaggtcatggcacacatgttgctggcacgattgcatcttatgggagtgtaagcggagtgatgcagagtgcgacactgatcccggtcaaagtgctcgataattctggcagcgggtccctttacggtattacgcaaggcatattgtatgccgccgacatcgatgcggacgtcattaacatgtctctgggtggaggaggctataatcagagcatggatgaggctgttcaaacagcagttgctcagggaaccattgtagtagcagcgactggcaatgatggtgcatcgtcgatcagttatcctgctgcctacagcagcgtcattgcggtgggatctgtgacgtccaatcgtacacgatcctcgttttctaactatggatctgggcttgaagttatggcaccgggcagcaacatctacagtacgtatcctaattccagatatacatctttgagtggtacaagcatggctactccgcacgttgcgggcgtagctgggctcattcgcgcagccaacccagacatatctgtcgcgcaagcccgtcagattctgcgggataccgcgcaagaagcaggatcgttcacacagtacggctatggaatcgtcgatgctcatgccgccgttgttgctgcatccggtggtagcggcggc

SEQ ID NO: 878 - protein, 413 aa, synthetic construct
  REGION 1..413: note = Variant of serine peptidase from Bacillus sinesaloumensis
MADQASQANGNQDVIEGELIVSVEPKNGKPDVSIQSAQSVTGQEDVLKSKGFTIVDTLHVEDSSVKPLVSKNFNKKVVEKMGLVYLVQYSPDQFKSSNIAKKELRKELMDLGFKVRYISENYKMMAIEGTATLQAVHPLQNWHYNMIKAPEAWAITSGSSSVKVAVLDTGIDHNHPSLANFVNTNLGRSFVGGNTMDVQGHGTHVAGTIASYGSVSGVMQSATLIPVKVLDNSGSGSLYGITQGILYAADIDADVINMSLGGGGYNQSMDEAVQTAVAQGTIVVAATGNDGASSISYPAAYSSVIAVGSVTSNRTRSSFSNYGSGLEVMAPGSNIYSTYPNSRYTSLSGTSMATPHVAGVAGLIRAANPDISVAQARQILRDTAQEAGSFTQYGYGIVDAHAAVVAASGGSGG

SEQ ID NO: 879 - DNA, 1239 bp, synthetic construct
  misc_feature 1..1239: note = Variant of serine peptidase from Bacillus sinesaloumensis
  source 1..1239: mol_type = other DNA
atggcagatcaagctagtcaagctaatggaaaccaggacgtcattgaaggcgagctgatcgtttcagtggaaccgaagaacggtaaacctgatgtgagcattcaaagtgcacaatccgtaacagggcaggaagacgtccttaaatcgaaaggctttacgatcgttgataccttgcatgtagaggatagcagcgtcaagccactcgtctcgaagaatttcaataagaaagtggtggagaagatgggactggtgtatcttgttcaatactctccggaccagtttaaaagttccaacattgcgaagaaagaactcagaaaagaattgatggatctgggctttaaagtccgctatataagcgaaaattacaagatgatggcgatcgaaggtacagccactcttcaggcagtacaccctaaccaaaactggcattataatatgattaaagctccggaagcgtgggctattacgtctggatcctctagcgttaaagtagcagtcctggatacagggatcgaccataatcacccatccttggccaacttcgtgaatactaatcttggccggtcgtttgttggaggaaacaccatggatgttcaaggtcatggcacacatgttgctggcacgattgcatcttatgggagtgtaagcggagtgatgcagagtgcgacactgatcccggtcaaagtgctcgataattctggcagcgggtccctttacggtattacgcaaggcatattgtatgccgccgacatcgatgcggacgtcattaacatgtctctgggtgcgggaggctataatcagagcatggatgaggctgttcaaacagcagttgctcagggaaccattgtagtagcagcgactggcaatgatggtgcatcgtcgatcagttatcctgctgcctacagcagcgtcattgcggtgggatctgtgacgtccaatcgtacacgatcctcgttttctaactatggatctgggcttgaagttatggcaccgggcagcaacatctacagtacgtatcctaattccagatatacatctttgagtggtacaagcatggctactccgcacgttgcgggcgtagctgggctcattcgcgcagccaacccagacatatctgtcgcgcaagcccgtcagattctgcgggataccgcgcaagaagcaggatcgttcacacagtacggctatggaatcgtcgatgctcatgccgccgttgttgctgcatccggtggtagcggcggc

SEQ ID NO: 880 - protein, 413 aa, synthetic construct
  REGION 1..413: note = Variant of serine peptidase from Bacillus sinesaloumensis
MADQASQANGNQDVIEGELIVSVEPKNGKPDVSIQSAQSVTGQEDVLKSKGFTIVDTLHVEDSSVKPLVSKNFNKKVVEKMGLVYLVQYSPDQFKSSNIAKKELRKELMDLGFKVRYISENYKMMAIEGTATLQAVHPNQNWHYNMIKAPEAWAITSGSSSVKVAVLDTGIDHNHPSLANFVNTNLGRSFVGGNTMDVQGHGTHVAGTIASYGSVSGVMQSATLIPVKVLDNSGSGSLYGITQGILYAADIDADVINMSLGAGGYNQSMDEAVQTAVAQGTIVVAATGNDGASSISYPAAYSSVIAVGSVTSNRTRSSFSNYGSGLEVMAPGSNIYSTYPNSRYTSLSGTSMATPHVAGVAGLIRAANPDISVAQARQILRDTAQEAGSFTQYGYGIVDAHAAVVAASGGSGG

SEQ ID NO: 881 - DNA, 1239 bp, synthetic construct
  misc_feature 1..1239: note = Variant of serine peptidase from Bacillus sinesaloumensis
  source 1..1239: mol_type = other DNA
atggcagatcaagctagtcaagctaatggaaaccaggacgtcattgaaggcgagctgatcgtttcagtggaaccgaagaacggtaaacctgatgtgagcattcaaagtgcacaatccgtaacagggcaggaagacgtccttaaatcgaaaggctttacgatcgttgataccttgcatgtagaggatagcagcgtcaagccactcgtctcgaagaatttcaataagaaagtggtggagaagatgggactggtgtatcttgttcaatactctccggaccagtttaaaagttccaacattgcgaagaaagaactcagaaaagaattgatggatctgggctttaaagtccgctatataagcgaaaattacaagatgatggcgatcgaaggtacagccactcttcaggcagtacaccctaaccaaaactggcattataatatgattaaagctccggaagcgtgggctattacgtctggatcctctagcgttaaagtagcagtcctggatagtgggatcgaccataatcacccatccttggccaacttcgtgaatactaatcttggccggtcgtttgttggaggaaacaccatggatgttcaaggtcatggcacacatgttgctggcacgattgcatcttatgggagtgtaagcggagtgatgcagagtgcgacactgatcccggtcaaagtgctcgataattctggcagcgggtccctttacggtattacgcaaggcatattgtatgccgccgacatcgatgcggacgtcattaacatgtctctgggtggaggaggctataatcagagcatggatgaggctgttcaaacagcagttgctcagggaaccattgtagtagcagcgactggcaatgatggtgcatcgtcgatcagttatcctgctgcctacagcagcgtcattgcggtgggatctgtgacgtccaatcgtacacgatcctcgttttctaactatggatctgggcttgaagttatggcaccgggcagcaacatctacagtacgtatcctaattccagatatacatctttgagtggtacaagcatggctactccgcacgttgcgggcgtagctgggctcattcgcgcagccaacccagacatatctgtcgcgcaagcccgtcagattctgcgggataccgcgcaagaagcaggatcgttcacacagtacggctatggaatcgtcgatgctcatgccgccgttgttgctgcatccggtggtagcggcggc

SEQ ID NO: 882 - protein, 413 aa, synthetic construct
  REGION 1..413: note = Variant of serine peptidase from Bacillus sinesaloumensis
MADQASQANGNQDVIEGELIVSVEPKNGKPDVSIQSAQSVTGQEDVLKSKGFTIVDTLHVEDSSVKPLVSKNFNKKVVEKMGLVYLVQYSPDQFKSSNIAKKELRKELMDLGFKVRYISENYKMMAIEGTATLQAVHPNQNWHYNMIKAPEAWAITSGSSSVKVAVLDSGIDHNHPSLANFVNTNLGRSFVGGNTMDVQGHGTHVAGTIASYGSVSGVMQSATLIPVKVLDNSGSGSLYGITQGILYAADIDADVINMSLGGGGYNQSMDEAVQTAVAQGTIVVAATGNDGASSISYPAAYSSVIAVGSVTSNRTRSSFSNYGSGLEVMAPGSNIYSTYPNSRYTSLSGTSMATPHVAGVAGLIRAANPDISVAQARQILRDTAQEAGSFTQYGYGIVDAHAAVVAASGGSGG

SEQ ID NO: 883 - DNA, 1239 bp, synthetic construct
  misc_feature 1..1239: note = Variant of serine peptidase from Bacillus sinesaloumensis
  source 1..1239: mol_type = other DNA
atggcagatcaagctagtcaagctaatggaaaccaggacgtcattgaaggcgagctgatcgtttcagtggaaccgaagaacggtaaacctgatgtgagcattcaaagtgcacaatccgtaacagggcaggaagacgtccttaaatcgaaaggctttacgatcgttgataccttgcatgtagaggatagcagcgtcaagccactcgtctcgaagaatttcaataagaaagtggtggagaagatgggactggtgtatcttgttcaatactctccggaccagtttaaaagttccaacattgcgaagaaagaactcagaaaagaattgatggatctgggctttaaagtccgctatataagcgaaaattacaagatgatggcgatcgaaggtacagccactcttcaggcagtacaccctaaccaaaactggcattataatatgattaaagctccggaagcgtgggctattacgtctggatcctctagcgttaaagtagcagtcctggatacagggatcgaccataatcacccatccttggccaacttcgtgaatactaatcttggccggtcgtttgttggaggaaacaccatggatgttcaaggtcatggcacacatgttgctggcacgattgcatcttatgggagtgtaagcggagtgatgcagagtgcgacactgatcccggtcaaagtgctcgataattctggcagcgggtccctttacggtattacgcaaggcatattgtatgccgccgacatcgatgcggacgtcattaacatgtctctgggtggaggaggctataatcagagcatggatgaggctgttcaaacagcagttgctcagggaaccattgtagtagcagcgactggcaatgatggtgcatcgtcgatcagttatcctgctgcctacagcagcgtcattgcggtgggatctgtgacgtccaatcgtacacgatcctcgttttctaactatggatctgggcttgaagttatggcaccgggcagcaacatctacagtacgtatcctaattccagatatacaacgttgagtggtacaagcatggctactccgcacgttgcgggcgtagctgggctcattcgcgcagccaacccagacatatctgtcgcgcaagcccgtcagattctgcgggataccgcgcaagaagcaggatcgttcacacagtacggctatggaatcgtcgatgctcatgccgccgttgttgctgcatccggtggtagcggcggc

SEQ ID NO: 884 - protein, 413 aa, synthetic construct
  REGION 1..413: note = Variant of serine peptidase from Bacillus sinesaloumensis
MADQASQANGNQDVIEGELIVSVEPKNGKPDVSIQSAQSVTGQEDVLKSKGFTIVDTLHVEDSSVKPLVSKNFNKKVVEKMGLVYLVQYSPDQFKSSNIAKKELRKELMDLGFKVRYISENYKMMAIEGTATLQAVHPNQNWHYNMIKAPEAWAITSGSSSVKVAVLDTGIDHNHPSLANFVNTNLGRSFVGGNTMDVQGHGTHVAGTIASYGSVSGVMQSATLIPVKVLDNSGSGSLYGITQGILYAADIDADVINMSLGGGGYNQSMDEAVQTAVAQGTIVVAATGNDGASSISYPAAYSSVIAVGSVTSNRTRSSFSNYGSGLEVMAPGSNIYSTYPNSRYTTLSGTSMATPHVAGVAGLIRAANPDISVAQARQILRDTAQEAGSFTQYGYGIVDAHAAVVAASGGSGG

SEQ ID NO: 885 - DNA, 1239 bp, synthetic construct
  misc_feature 1..1239: note = Variant of serine peptidase from Bacillus sinesaloumensis
  source 1..1239: mol_type = other DNA
atggcagatcaagctagtcaagctaatggaaaccaggacgtcattgaaggcgagctgatcgtttcagtggaaccgaagaacggtaaacctgatgtgagcattcaaagtgcacaatccgtaacagggcaggaagacgtccttaaatcgaaaggctttacgatcgttgataccttgcatgtagaggatagcagcgtcaagccactcgtctcgaagaatttcaataagaaagtggtggagaagatgggactggtgtatcttgttcaatactctccggaccagtttaaaagttccaacattgcgaagaaagaactcagaaaagaattgatggatctgggctttaaagtccgctatataagcgaaaattacaagatgatggcgatcgaaggtacagccactcttcaggcagtacaccctaaccaaaactggaattataatatgattaaagctccggaagcgtgggctattacgtctggatcctctagcgttaaagtagcagtcctggatacagggatcgaccataatcacccatccttggccaacttcgtgaatactaatcttggccggtcgtttgttggaggaaacaccatggatgttcaaggtcatggcacacatgttgctggcacgattgcatcttatgggagtgtaagcggagtgatgcagagtgcgacactgatcccggtcaaagtgctcgataattctggcagcggggctctttacggtattacgcaaggcatattgtatgccgccgacatcgatgcggacgtcattaacatgtctctgggtggaggaggctataatcagagcatggatgaggctgttcaaacagcagttgctcagggaaccattgtagtagcagcgactggcaatgatggtgcatcgtcgatcagttatcctgctgcctacagcagcgtcattgcggtgggatctgtgacgtccaatcgtacacgatcctcgttttctaactatggatctgggcttgaagttatggcaccgggcagcaacatctacagtacgtatcctaattccagatatacatctttgagtggtacaagcatggctactccgcacgttgcgggcgtagctgggctcattcgcgcagccaacccagacatatctgtcgcgcaagcccgtcagattctgcgggataccgcgcaagaagcaggatcgttcacacagtacggctatggaatcgtcgatgctcatgccgccgttgttgctgcatccggtggtagcggcggc

SEQ ID NO: 886 - protein, 413 aa, synthetic construct
  REGION 1..413: note = Variant of serine peptidase from Bacillus sinesaloumensis
MADQASQANGNQDVIEGELIVSVEPKNGKPDVSIQSAQSVTGQEDVLKSKGFTIVDTLHVEDSSVKPLVSKNFNKKVVEKMGLVYLVQYSPDQFKSSNIAKKELRKELMDLGFKVRYISENYKMMAIEGTATLQAVHPNQNWNYNMIKAPEAWAITSGSSSVKVAVLDTGIDHNHPSLANFVNTNLGRSFVGGNTMDVQGHGTHVAGTIASYGSVSGVMQSATLIPVKVLDNSGSGALYGITQGILYAADIDADVINMSLGGGGYNQSMDEAVQTAVAQGTIVVAATGNDGASSISYPAAYSSVIAVGSVTSNRTRSSFSNYGSGLEVMAPGSNIYSTYPNSRYTSLSGTSMATPHVAGVAGLIRAANPDISVAQARQILRDTAQEAGSFTQYGYGIVDAHAAVVAASGGSGG

SEQ ID NO: 887 - DNA, 1239 bp, synthetic construct
  misc_feature 1..1239: note = Variant of serine peptidase from Bacillus sinesaloumensis
  source 1..1239: mol_type = other DNA
atggcagatcaagctagtcaagctaatggaaaccaggacgtcattgaaggcgagctgatcgtttcagtggaaccgaagaacggtaaacctgatgtgagcattcaaagtgcacaatccgtaacagggcaggaagacgtccttaaatcgaaaggctttacgatcgttgataccttgcatgtagaggatagcagcgtcaagccactcgtctcgaagaatttcaataagaaagtggtggagaagatgggactggtgtatcttgttcaatactctccggaccagtttaaaagttccaacattgcgaagaaagaactcagaaaagaattgatggatctgggctttaaagtccgctatataagcgaaaattacaagatgatggcgatcgaaggtacagccactcttcaggcgatgcaccctaaccaaaactggcattataatatgattaaagctccggaagcgtgggctattacgtctggatccctgagcgttaaagtagcagtcctggatacagggatcgaccataatcacccatccttggccaacttcgtgaatactgaacttggccgctcgtttgttggaggaaacaccatggatgttcaaggtcatggcacacatgttgctggcacgattgcatcttatgggagtgtaagcggagtgatgcagagtgcgacactgatcccggtcaaagtgctcgataattctggcagcgggtccctttacggtattacgcaaggcatattgtatgccgccgacatcgatgcggacgtcattaacatgtctctgggtggaggaggctataatatcagcatggatgaggctgttcaaacagcagttgctcagggaaccattgtagtagcagcgactggcaatgatggtgcatcgtcgatcagttatcctgctgcctacagcagcgtcattgcggtgggatctgtggactccaatcgtacccgatcctcgttttctaactatggatctgggcttgaagttatggcaccgggcagcaacatctacagtacgtatcctaattccagatatacatctttgagtggtacaagcatggctactccgcacgttgcgggcgtagctgggctcattcgcgcagccaacccagacatactggtcgcgcaagcccgtcagattctgcgggataccgcgcaagaagcaggatcgttcacacagtacggctatggaatcgtcgatgctcatgccgccgttgttgctgcatccggtggtagcggcggc

SEQ ID NO: 888 - protein, 413 aa, synthetic construct
  REGION 1..413: note = Variant of serine peptidase from Bacillus sinesaloumensis
MADQASQANGNQDVIEGELIVSVEPKNGKPDVSIQSAQSVTGQEDVLKSKGFTIVDTLHVEDSSVKPLVSKNFNKKVVEKMGLVYLVQYSPDQFKSSNIAKKELRKELMDLGFKVRYISENYKMMAIEGTATLQAMHPNQNWHYNMIKAPEAWAITSGSLSVKVAVLDTGIDHNHPSLANFVNTELGRSFVGGNTMDVQGHGTHVAGTIASYGSVSGVMQSATLIPVKVLDNSGSGSLYGITQGILYAADIDADVINMSLGGGGYNISMDEAVQTAVAQGTIVVAATGNDGASSISYPAAYSSVIAVGSVDSNRTRSSFSNYGSGLEVMAPGSNIYSTYPNSRYTSLSGTSMATPHVAGVAGLIRAANPDILVAQARQILRDTAQEAGSFTQYGYGIVDAHAAVVAASGGSGG

SEQ ID NO: 889 - DNA, 1239 bp, synthetic construct
  misc_feature 1..1239: note = Variant of serine peptidase from Bacillus sinesaloumensis
  source 1..1239: mol_type = other DNA
atggcagatcaagctagtcaagctaatggaaaccaggacgtcattgaaggcgagctgatcgtttcagtggaaccgaagaacggtaaacctgatgtgagcattcaaagtgcacaatccgtaacagggcaggaagacgtccttaaatcgaaaggctttacgatcgttgataccttgcatgtagaggatagcagcgtcaagccactcgtctcgaagaatttcaataagaaagtggtggagaagatgggactggtgtatcttgttcaatactctccggaccagtttaaaagttccaacattgcgaagaaagaactcagaaaagaattgatggatctgggctttaaagtccgctatataagcgaaaattacaagatgatggcgatcgaaggtacagccactcttcaggaggtgcaccctaaccaaaactggcattataatatgattaaagctccggaagcgtgggctattacgtctggatccctgagcgttaaagtagcagtcctggatacagggatcgaccataatcacccatccttggccaacttcgtgaatactaatcttggccggtcgtttgttggaggaaacaccatggatgttcaaggtcatggcacacatgttgctggcacgattgcatcttatgggagtgtaagcggagtgatgcagagtgcgacactgatcccggtcaaagtgctcgataattctggcagcgggtccctttacggtattacgcaaggcatattgtatgccgccgacatcgatgcggacgtcattaacatgtctctgggtggaggaggctataatcagagcatggatgaggctgttcaaacagcagttgctcagggaaccattgtagtagcagcgactggcaatgatggtgcatcgtcgatcagttatcctgctgcctacagcagcgtcattgcggtgggatctgtggactccaatcgtacccgatcctcgttttctaactatggatctgggcttgaagttatggcaccgggcagcaacatctacagtacgtatcctaattccagatatacatctttgagtggtacaagcatggctactccgcacgttgcgggcgtagctgggctcattcgcgcagccaacccagacatactggtcgcgcaagcccgtcagattctgcgggataccgcgcaagaagcaggatcgttcacacagtacggctatggaatcgtcgatgctcatgccgccgttgttgctgcatccggtggtagcggcggc

SEQ ID NO: 890 - protein, 413 aa, synthetic construct
  REGION 1..413: note = Variant of serine peptidase from Bacillus sinesaloumensis
MADQASQANGNQDVIEGELIVSVEPKNGKPDVSIQSAQSVTGQEDVLKSKGFTIVDTLHVEDSSVKPLVSKNFNKKVVEKMGLVYLVQYSPDQFKSSNIAKKELRKELMDLGFKVRYISENYKMMAIEGTATLQEVHPNQNWHYNMIKAPEAWAITSGSLSVKVAVLDTGIDHNHPSLANFVNTNLGRSFVGGNTMDVQGHGTHVAGTIASYGSVSGVMQSATLIPVKVLDNSGSGSLYGITQGILYAADIDADVINMSLGGGGYNQSMDEAVQTAVAQGTIVVAATGNDGASSISYPAAYSSVIAVGSVDSNRTRSSFSNYGSGLEVMAPGSNIYSTYPNSRYTSLSGTSMATPHVAGVAGLIRAANPDILVAQARQILRDTAQEAGSFTQYGYGIVDAHAAVVAASGGSGG

SEQ ID NO: 891 - DNA, 1239 bp, synthetic construct
  misc_feature 1..1239: note = Variant of serine peptidase from Bacillus sinesaloumensis
  source 1..1239: mol_type = other DNA
atggcagatcaagctagtcaagctaatggaaaccaggacgtcattgaaggcgagctgatcgtttcagtggaaccgaagaacggtaaacctgatgtgagcattcaaagtgcacaatccgtaacagggcaggaagacgtccttaaatcgaaaggctttacgatcgttgataccttgcatgtagaggatagcagcgtcaagccactcgtctcgaagaatttcaataagaaagtggtggagaagatgggactggtgtatcttgttcaatactctccggaccagtttaaaagttccaacattgcgaagaaagaactcagaaaagaattgatggatctgggctttaaagtccgctatataagcgaaaattacaagatgatggcgatcgaaggtacagccactcttcagggggtgcaccctaaccaagtttggcattataatatgattaaagctccggaagcgtgggctattacgtctggatcctctagcgttaaagtagcagtcctggatacagggatcgaccataatcacccatccttggccaacttcgtgaatactaatcttggccgctcgtttgttggaggaaacaccatggatgttcaaggtcatggcacacatgttgctggcacgattgcatcttatgggagtgtaagcggagtgatgcagagtgcgacactgatcccggtcaaagtgctcgataattctggcagcgggtccctttacggtattacgcaaggcatattgtatgccgccgacatcgatgcggacgtcattaacatgtctctgggtggaggaggctataatcagagcatggatgaggctgttcaaacagcagttgctcagggaaccattgtagtagcagcgactggcaatgatggtgcatcgtcgatcagttatcctgctgcctacagcagcgtcattgcggtgggatctgtggactccaatcgtgttcgatcctcgttttctaactatggatctgggcttgaagttatggcaccgggcagcaacatctacagtacgtatcctaattccagatatacatctttgagtggtacaagcatggctactccgcacgttgcgggcgtagctgggctcattcgcgcagccaacccagacataagtgtcgcgcaagcccgtcagattctgcgggataccgcgcaagaagcaggatcgttcacacagtacggctatggaatcgtcgatgctcatgccgccgttgttgctgcatccggtggtagcggcggc

SEQ ID NO: 892 - protein, 413 aa, synthetic construct
  REGION 1..413: note = Variant of serine peptidase from Bacillus sinesaloumensis
MADQASQANGNQDVIEGELIVSVEPKNGKPDVSIQSAQSVTGQEDVLKSKGFTIVDTLHVEDSSVKPLVSKNFNKKVVEKMGLVYLVQYSPDQFKSSNIAKKELRKELMDLGFKVRYISENYKMMAIEGTATLQGVHPNQVWHYNMIKAPEAWAITSGSSSVKVAVLDTGIDHNHPSLANFVNTNLGRSFVGGNTMDVQGHGTHVAGTIASYGSVSGVMQSATLIPVKVLDNSGSGSLYGITQGILYAADIDADVINMSLGGGGYNQSMDEAVQTAVAQGTIVVAATGNDGASSISYPAAYSSVIAVGSVDSNRVRSSFSNYGSGLEVMAPGSNIYSTYPNSRYTSLSGTSMATPHVAGVAGLIRAANPDISVAQARQILRDTAQEAGSFTQYGYGIVDAHAAVVAASGGSGG

SEQ ID NO: 893 - DNA, 1239 bp, synthetic construct
  misc_feature 1..1239: note = Variant of serine peptidase from Bacillus sinesaloumensis
  source 1..1239: mol_type = other DNA
atggcagatcaagctagtcaagctaatggaaaccaggacgtcattgaaggcgagctgatcgtttcagtggaaccgaagaacggtaaacctgatgtgagcattcaaagtgcacaatccgtaacagggcaggaagacgtccttaaatcgaaaggctttacgatcgttgataccttgcatgtagaggatagcagcgtcaagccactcgtctcgaagaatttcaataagaaagtggtggagaagatgggactggtgtatcttgttcaatactctccggaccagtttaaaagttccaacattgcgaagaaagaactcagaaaagaattgatggatctgggctttaaagtccgctatataagcgaaaattacaagatgatggcgatcgaaggtacagccactcttcaggcggtgcaccctaaccaagtttggcattataatatgattaaagctccggaagcgtgggctattacgtctggatcctctagcgttaaagtagcagtcctggatacagggatcgaccataatcacccatccttggccaacttcgtgaatactaatcttggccggtcgtttgttggaggaaacaccatggatgttcaaggtcatggcacacatgttgctggcacgattgcatcttatgggagtgtaagcggagtgatgcagagtgcgacactgatcccggtcaaagtgctcgataattctggcagcgggtccctttacggtattacgcaaggcatattgtatgccgccgacatcgatgcggacgtcattaacatgtctctgggtggaggaggctataatcagagcatggatgaggctgttcaaacagcagttgctcagggaaccattgtagtagcagcgactggcaatgatggtgcatcgtcgatcagttatcctgctgcctacagcagcgtcattgcggtgggatctgtggactccaatcgtgttcgatcctcgttttctaactatggatctgggcttgaagttatggcaccgggcagcaacatctacagtacgtatcctaattccagatatacatctttgagtggtacaagcatggctactccgcacgttgcgggcgtagctgggctcattcgcgcagccaacccagacataagtgtcgcgcaagcccgtcagattctgcgggataccgcgcaagaagcaggatcgttcacacagtacggctatggaatcgtcgatgctcatgccgccgttgttgctgcatccggtggtagcggcggc

SEQ ID NO: 894 - protein, 413 aa, synthetic construct
  REGION 1..413: note = Variant of serine peptidase from Bacillus sinesaloumensis
MADQASQANGNQDVIEGELIVSVEPKNGKPDVSIQSAQSVTGQEDVLKSKGFTIVDTLHVEDSSVKPLVSKNFNKKVVEKMGLVYLVQYSPDQFKSSNIAKKELRKELMDLGFKVRYISENYKMMAIEGTATLQAVHPNQVWHYNMIKAPEAWAITSGSSSVKVAVLDTGIDHNHPSLANFVNTNLGRSFVGGNTMDVQGHGTHVAGTIASYGSVSGVMQSATLIPVKVLDNSGSGSLYGITQGILYAADIDADVINMSLGGGGYNQSMDEAVQTAVAQGTIVVAATGNDGASSISYPAAYSSVIAVGSVDSNRVRSSFSNYGSGLEVMAPGSNIYSTYPNSRYTSLSGTSMATPHVAGVAGLIRAANPDISVAQARQILRDTAQEAGSFTQYGYGIVDAHAAVVAASGGSGG

SEQ ID NO: 895 - DNA, 1239 bp, synthetic construct
  misc_feature 1..1239: note = Variant of serine peptidase from Bacillus sinesaloumensis
  source 1..1239: mol_type = other DNA
atggcagatcaagctagtcaagctaatggaaaccaggacgtcattgaaggcgagctgatcgtttcagtggaaccgaagaacggtaaacctgatgtgagcattcaaagtgcacaatccgtaacagggcaggaagacgtccttaaatcgaaaggctttacgatcgttgataccttgcatgtagaggatagcagcgtcaagccactcgtctcgaagaatttcaataagaaagtggtggagaagatgggactggtgtatcttgttcaatactctccggaccagtttaaaagttccaacattgcgaagaaagaactcagaaaagaattgatggatctgggctttaaagtccgctatataagcgaaaattacaagatgatggcgatcgaaggtacagccactcttcaggcgatgcaccctaaccaagtttggcattataatatgattaaagctccggaagcgtgggctattacgtctggatccctgagcgttaaagtagcagtcctggatacagggatcgaccataatcacccatccttggccaacttcgtgaatactgaacttggcatgtcgtttgttggaggaaacaccatggatgttcaaggtcatggcacacatgttgctggcacgattgcatcttatgggagtgtaagcggagtgatgcagagtgcgacactgatcccggtcaaagtgctcgataattctggcagcgggtccctttacggtattacgcaaggcatattgtatgccgccgacatcgatgcggacgtcattaacatgtctctgggtggaggaggctataatcagagcatggatgaggctgttcaaacagcagttgctcagggaaccattgtagtagcagcgactggcaatgatggtgcatcgtcgatcagttatcctgctgcctacagcagcgtcattgcggtgggatctgtggactccaatcgtgttcgatcctcgttttctaactatggatctgggcttgaagttatggcaccgggcagcaacatctacagtacgtatcctaattccagatatacatctttgagtggtacaagcatggctactccgcacgttgcgggcgtagctgggctcattcgcgcagccaacccagacatagtggtcgcgcaagcccgtcagattctgcgggataccgcgcaagaagcaggatcgttcacacagtacggctatggaatcgtcgatgctcatgccgccgttgttgctgcatccggtggtagcggcggc

SEQ ID NO: 896 - protein, 413 aa, synthetic construct
  REGION 1..413: note = Variant of serine peptidase from Bacillus sinesaloumensis
MADQASQANGNQDVIEGELIVSVEPKNGKPDVSIQSAQSVTGQEDVLKSKGFTIVDTLHVEDSSVKPLVSKNFNKKVVEKMGLVYLVQYSPDQFKSSNIAKKELRKELMDLGFKVRYISENYKMMAIEGTATLQAMHPNQVWHYNMIKAPEAWAITSGSLSVKVAVLDTGIDHNHPSLANFVNTELGMSFVGGNTMDVQGHGTHVAGTIASYGSVSGVMQSATLIPVKVLDNSGSGSLYGITQGILYAADIDADVINMSLGGGGYNQSMDEAVQTAVAQGTIVVAATGNDGASSISYPAAYSSVIAVGSVDSNRVRSSFSNYGSGLEVMAPGSNIYSTYPNSRYTSLSGTSMATPHVAGVAGLIRAANPDIVVAQARQILRDTAQEAGSFTQYGYGIVDAHAAVVAASGGSGG

SEQ ID NO: 897 - DNA, 1239 bp, synthetic construct
  misc_feature 1..1239: note = Variant of serine peptidase from Bacillus sinesaloumensis
  source 1..1239: mol_type = other DNA
atggcagatcaagctagtcaagctaatggaaaccaggacgtcattgaaggcgagctgatcgtttcagtggaaccgaagaacggtaaacctgatgtgagcattcaaagtgcacaatccgtaacagggcaggaagacgtccttaaatcgaaaggctttacgatcgttgataccttgcatgtagaggatagcagcgtcaagccactcgtctcgaagaatttcaataagaaagtggtggagaagatgggactggtgtatcttgttcaatactctccggaccagtttaaaagttccaacattgcgaagaaagaactcagaaaagaattgatggatctgggctttaaagtccgctatataagcgaaaattacaagatgatggcgatcgaaggtacagccactcttcagggggtgcaccctaaccaagtttggcattataatatgattaaagctccggaagcgtgggctattacgtctggatcctcgagcgttaaagtagcagtcctggatacagggatcgaccataatcacccatccttggccaacttcgtgaatactaatcttggccgctcgtttgttggaggaaacaccatggatgttcaaggtcatggcacacatgttgctggcacgattgcatcttatgggagtgtaagcggagtgatgcagagtgcgacactgatcccggtcaaagtgctcgataattctggcagcgggtccctttacggtattacgcaaggcatattgtatgccgccgacatcgatgcggacgtcattaacatgtctctgggtggaggaggctataatcagagcatggatgaggctgttcaaacagcagttgctcagggaaccattgtagtagcagcgactggcaatgatggtgcatcgtcgatcagttatcctgctgcctacagcagcgtcattgcggtgggatctgtggactccaatcgtgttcgatcctcgttttctaactatggatctgggcttgaagttatggcaccgggcagcaacatctacagtacgtatcctaattccagatatacatctttgagtggtacaagcatggctactccgcacgttgcgggcgtagctgggctcattcgcgcagccaacccagacatactggtcgcgcaagcccgtcagattctgcgggataccgcgcaagaagcaggatcgttcacacagtacggctatggaatcgtcgatgctcatgccgccgttgttgctgcatccggtggtagcggcggc

SEQ ID NO: 898 - protein, 413 aa, synthetic construct
  REGION 1..413: note = Variant of serine peptidase from Bacillus sinesaloumensis
MADQASQANGNQDVIEGELIVSVEPKNGKPDVSIQSAQSVTGQEDVLKSKGFTIVDTLHVEDSSVKPLVSKNFNKKVVEKMGLVYLVQYSPDQFKSSNIAKKELRKELMDLGFKVRYISENYKMMAIEGTATLQGVHPNQVWHYNMIKAPEAWAITSGSSSVKVAVLDTGIDHNHPSLANFVNTNLGRSFVGGNTMDVQGHGTHVAGTIASYGSVSGVMQSATLIPVKVLDNSGSGSLYGITQGILYAADIDADVINMSLGGGGYNQSMDEAVQTAVAQGTIVVAATGNDGASSISYPAAYSSVIAVGSVDSNRVRSSFSNYGSGLEVMAPGSNIYSTYPNSRYTSLSGTSMATPHVAGVAGLIRAANPDILVAQARQILRDTAQEAGSFTQYGYGIVDAHAAVVAASGGSGG

SEQ ID NO: 899 - DNA, 1239 bp, synthetic construct
  misc_feature 1..1239: note = Variant of serine peptidase from Bacillus sinesaloumensis
  source 1..1239: mol_type = other DNA
atggcagatcaagctagtcaagctaatggaaaccaggacgtcattgaaggcgagctgatcgtttcagtggaaccgaagaacggtaaacctgatgtgagcattcaaagtgcacaatccgtaacagggcaggaagacgtccttaaatcgaaaggctttacgatcgttgataccttgcatgtagaggatagcagcgtcaagccactcgtctcgaagaatttcaataagaaagtggtggagaagatgggactggtgtatcttgttcaatactctccggaccagtttaaaagttccaacattgcgaagaaagaactcagaaaagaattgatggatctgggctttaaagtccgctatataagcgaaaattacaagatgatggcgatcgaaggtacagccactcttcagggggtgcaccctaaccaacaatggcattataatatgattaaagctccggaagcgtgggctattacgtctggatccctgagcgttaaagtagcagtcctggatacagggatcgaccataatcacccatccttggccaacttcgtgaatactgaacttggccgctcgtttgttggaggaaacaccatggatgttcaaggtcatggcacacatgttgctggcacgattgcatcttatgggagtgtaagcggagtgatgcagagtgcgacactgatcccggtcaaagtgctcgataattctggcagcgggtccctttacggtattacgcaaggcatattgtatgccgccgacatcgatgcggacgtcattaacatgtctctgggtggaggaggctataatcagagcatggatgaggctgttcaaacagcagttgctcagggaaccattgtagtagcagcgactggcaatgatggtgcatcgtcgatcagttatcctgctgcctacagcagcgtcattgcggtgggatctgtggactccaatcgtgttcgatcctcgttttctaactatggatctgggcttgaagttatggcaccgggcagcaacatctacagtacgtatcctaattccagatatacatctttgagtggtacaagcatggctactccgcacgttgcgggcgtagctgggctcattcgcgcagccaacccagacataagtgtcgcgcaagcccgtcagattctgcgggataccgcgcaagaagcaggatcgttcacacagtacggctatggaatcgtcgatgctcatgccgccgttgttgctgcatccggtggtagcggcggc

SEQ ID NO: 900 - protein, 413 aa, synthetic construct
  REGION 1..413: note = Variant of serine peptidase from Bacillus sinesaloumensis
MADQASQANGNQDVIEGELIVSVEPKNGKPDVSIQSAQSVTGQEDVLKSKGFTIVDTLHVEDSSVKPLVSKNFNKKVVEKMGLVYLVQYSPDQFKSSNIAKKELRKELMDLGFKVRYISENYKMMAIEGTATLQGVHPNQQWHYNMIKAPEAWAITSGSLSVKVAVLDTGIDHNHPSLANFVNTELGRSFVGGNTMDVQGHGTHVAGTIASYGSVSGVMQSATLIPVKVLDNSGSGSLYGITQGILYAADIDADVINMSLGGGGYNQSMDEAVQTAVAQGTIVVAATGNDGASSISYPAAYSSVIAVGSVDSNRVRSSFSNYGSGLEVMAPGSNIYSTYPNSRYTSLSGTSMATPHVAGVAGLIRAANPDISVAQARQILRDTAQEAGSFTQYGYGIVDAHAAVVAASGGSGG

SEQ ID NO: 901 - DNA, 1239 bp, synthetic construct
  misc_feature 1..1239: note = Variant of serine peptidase from Bacillus sinesaloumensis
  source 1..1239: mol_type = other DNA
atggcagatcaagctagtcaagctaatggaaaccaggacgtcattgaaggcgagctgatcgtttcagtggaaccgaagaacggtaaacctgatgtgagcattcaaagtgcacaatccgtaacagggcaggaagacgtccttaaatcgaaaggctttacgatcgttgataccttgcatgtagaggatagcagcgtcaagccactcgtctcgaagaatttcaataagaaagtggtggagaagatgggactggtgtatcttgttcaatactctccggaccagtttaaaagttccaacattgcgaagaaagaactcagaaaagaattgatggatctgggctttaaagtccgctatataagcgaaaattacaagatgatggcgatcgaaggtacagccactcttcagggggtgcaccctaaccaagtttggcattataatatgattaaagctccggaagcgtgggctattacgtctggatcctcgagcgttaaagtagcagtcctggatacagggatcgaccataatcacccatccttggccaacttcgtgaatactaatcttggccggtcgtttgttggaggaaacaccatggatgttcaaggtcatggcacacatgttgctggcacgattgcatcttatgggagtgtaagcggagtgatgcagagtgcgacactgatcccggtcaaagtgctcgataattctggcagcgggtccctttacggtattacgcaaggcatattgtatgccgccgacatcgatgcggacgtcattaacatgtctctgggtggaggaggctataatatcagcatggatgaggctgttcaaacagcagttgctcagggaaccattgtagtagcagcgactggcaatgatggtgcatcgtcgatcagttatcctgctgcctacagcagcgtcattgcggtgggatctgtggactccaatcgtgttcgatcctcgttttctaactatggatctgggcttgaagttatggcaccgggcagcaacatctacagtacgtatcctaattccagatatacatctttgagtggtacaagcatggctactccgcacgttgcgggcgtagctgggctcattcgcgcagccaacccagacatagtggtcgcgcaagcccgtcagattctgcgggataccgcgcaagaagcaggatcgttcacacagtacggctatggaatcgtcgatgctcatgccgccgttgttgctgcatccggtggtagcggcggc

SEQ ID NO: 902 - protein, 413 aa, synthetic construct
  REGION 1..413: note = Variant of serine peptidase from Bacillus sinesaloumensis
MADQASQANGNQDVIEGELIVSVEPKNGKPDVSIQSAQSVTGQEDVLKSKGFTIVDTLHVEDSSVKPLVSKNFNKKVVEKMGLVYLVQYSPDQFKSSNIAKKELRKELMDLGFKVRYISENYKMMAIEGTATLQGVHPNQVWHYNMIKAPEAWAITSGSSSVKVAVLDTGIDHNHPSLANFVNTNLGRSFVGGNTMDVQGHGTHVAGTIASYGSVSGVMQSATLIPVKVLDNSGSGSLYGITQGILYAADIDADVINMSLGGGGYNISMDEAVQTAVAQGTIVVAATGNDGASSISYPAAYSSVIAVGSVDSNRVRSSFSNYGSGLEVMAPGSNIYSTYPNSRYTSLSGTSMATPHVAGVAGLIRAANPDIVVAQARQILRDTAQEAGSFTQYGYGIVDAHAAVVAASGGSGG

SEQ ID NO: 903 - DNA, 1239 bp, synthetic construct
  misc_feature 1..1239: note = Variant of serine peptidase from Bacillus sinesaloumensis
  source 1..1239: mol_type = other DNA
atggcagatcaagctagtcaagctaatggaaaccaggacgtcattgaaggcgagctgatcgtttcagtggaaccgaagaacggtaaacctgatgtgagcattcaaagtgcacaatccgtaacagggcaggaagacgtccttaaatcgaaaggctttacgatcgttgataccttgcatgtagaggatagcagcgtcaagccactcgtctcgaagaatttcaataagaaagtggtggagaagatgggactggtgtatcttgttcaatactctccggaccagtttaaaagttccaacattgcgaagaaagaactcagaaaagaattgatggatctgggctttaaagtccgctatataagcgaaaattacaagatgatggcgatcgaaggtacagccactcttcaggggatgcaccctaaccaagtttggcattataatatgattaaagctccggaagcgtgggctattacgtctggatccctgagcgttaaagtagcagtcctggatacagggatcgaccataatcacccatccttggccaacttcgtgaatactaatcttggccggtcgtttgttggaggaaacaccatggatgttcaaggtcatggcacacatgttgctggcacgattgcatcttatgggagtgtaagcggagtgatgcagagtgcgacactgatcccggtcaaagtgctcgataattctggcagcgggtccctttacggtattacgcaaggcatattgtatgccgccgacatcgatgcggacgtcattaacatgtctctgggtggaggaggctataatcagagcatggatgaggctgttcaaacagcagttgctcagggaaccattgtagtagcagcgactggcaatgatggtgcatcgtcgatcagttatcctgctgcctacagcagcgtcattgcggtgggatctgtggactccaatcgtgttcgatcctcgttttctaactatggatctgggcttgaagttatggcaccgggcagcaacatctacagtacgtatcctaattccagatatacatctttgagtggtacaagcatggctactccgcacgttgcgggcgtagctgggctcattcgcgcagccaacccagacataagtgtcgcgcaagcccgtcagattctgcgggataccgcgcaagaagcaggatcgttcacacagtacggctatggaatcgtcgatgctcatgccgccgttgttgctgcatccggtggtagcggcggc

SEQ ID NO: 904 - protein, 413 aa, synthetic construct
  REGION 1..413: note = Variant of serine peptidase from Bacillus sinesaloumensis
MADQASQANGNQDVIEGELIVSVEPKNGKPDVSIQSAQSVTGQEDVLKSKGFTIVDTLHVEDSSVKPLVSKNFNKKVVEKMGLVYLVQYSPDQFKSSNIAKKELRKELMDLGFKVRYISENYKMMAIEGTATLQGMHPNQVWHYNMIKAPEAWAITSGSLSVKVAVLDTGIDHNHPSLANFVNTNLGRSFVGGNTMDVQGHGTHVAGTIASYGSVSGVMQSATLIPVKVLDNSGSGSLYGITQGILYAADIDADVINMSLGGGGYNQSMDEAVQTAVAQGTIVVAATGNDGASSISYPAAYSSVIAVGSVDSNRVRSSFSNYGSGLEVMAPGSNIYSTYPNSRYTSLSGTSMATPHVAGVAGLIRAANPDISVAQARQILRDTAQEAGSFTQYGYGIVDAHAAVVAASGGSGG

SEQ ID NO: 905 - DNA, 1239 bp, synthetic construct
  misc_feature 1..1239: note = Variant of serine peptidase from Bacillus sinesaloumensis
  source 1..1239: mol_type = other DNA
atggcagatcaagctagtcaagctaatggaaaccaggacgtcattgaaggcgagctgatcgtttcagtggaaccgaagaacggtaaacctgatgtgagcattcaaagtgcacaatccgtaacagggcaggaagacgtccttaaatcgaaaggctttacgatcgttgataccttgcatgtagaggatagcagcgtcaagccactcgtctcgaagaatttcaataagaaagtggtggagaagatgggactggtgtatcttgttcaatactctccggaccagtttaaaagttccaacattgcgaagaaagaactcagaaaagaattgatggatctgggctttaaagtccgctatataagcgaaaattacaagatgatggcgatcgaaggtacagccactcttcaggggatgcaccctaaccaagtttggcattataatatgattaaagctccggaagcgtgggctattacgtctggatcctcgagcgttaaagtagcagtcctggatacagggatcgaccataatcacccatccttggccaacttcgtgaatactaatcttggccgctcgtttgttggaggaaacaccatggatgttcaaggtcatggcacacatgttgctggcacgattgcatcttatgggagtgtaagcggagtgatgcagagtgcgacactgatcccggtcaaagtgctcgataattctggcagcgggtccctttacggtattacgcaaggcatattgtatgccgccgacatcgatgcggacgtcattaacatgtctctgggtggaggaggctataatcagagcatggatgaggctgttcaaacagcagttgctatgggaaccattgtagtagcagcgactggcaatgatggtgcatcgtcgatcagttatcctgctgcctacagcagcgtcattgcggtgggatctgtgacgtccaatcgtacacgatcctcgttttctaactatggatctgggcttgaagttatggcaccgggcagcaacatctacagtacgtatcctaattccagatatacatctttgagtggtacaagcatggctactccgcacgttgcgggcgtagctgggctcattcgcgcagccaacccagacataagtgtcgcgcaagcccgtcagattctgcgggataccgcgcaagaagcaggatcgttcacacagtacggctatggaatcgtcgatgctcatgccgccgttgttgctgcatccggtggtagcggcggc

SEQ ID NO: 906 - protein, 413 aa, synthetic construct
  REGION 1..413: note = Variant of serine peptidase from Bacillus sinesaloumensis
MADQASQANGNQDVIEGELIVSVEPKNGKPDVSIQSAQSVTGQEDVLKSKGFTIVDTLHVEDSSVKPLVSKNFNKKVVEKMGLVYLVQYSPDQFKSSNIAKKELRKELMDLGFKVRYISENYKMMAIEGTATLQGMHPNQVWHYNMIKAPEAWAITSGSSSVKVAVLDTGIDHNHPSLANFVNTNLGRSFVGGNTMDVQGHGTHVAGTIASYGSVSGVMQSATLIPVKVLDNSGSGSLYGITQGILYAADIDADVINMSLGGGGYNQSMDEAVQTAVAMGTIVVAATGNDGASSISYPAAYSSVIAVGSVTSNRTRSSFSNYGSGLEVMAPGSNIYSTYPNSRYTSLSGTSMATPHVAGVAGLIRAANPDISVAQARQILRDTAQEAGSFTQYGYGIVDAHAAVVAASGGSGG

SEQ ID NO: 907 - DNA, 1239 bp, synthetic construct
  misc_feature 1..1239: note = Variant of serine peptidase from Bacillus sinesaloumensis
  source 1..1239: mol_type = other DNA
atggcagatcaagctagtcaagctaatggaaaccaggacgtcattgaaggcgagctgatcgtttcagtggaaccgaagaacggtaaacctgatgtgagcattcaaagtgcacaatccgtaacagggcaggaagacgtccttaaatcgaaaggctttacgatcgttgataccttgcatgtagaggatagcagcgtcaagccactcgtctcgaagaatttcaataagaaagtggtggagaagatgggactggtgtatcttgttcaatactctccggaccagtttaaaagttccaacattgcgaagaaagaactcagaaaagaattgatggatctgggctttaaagtccgctatataagcgaaaattacaagatgatggcgatcgaaggtacagccactcttcagggggtgcaccctaaccaacaatggcattataatatgattaaagctccggaagcgtgggctattacgtctggatcctcgagcgttaaagtagcagtcctggatacagggatcgaccataatcacccatccttggccaacttcgtgaatactaatcttggccgctcgtttgttggaggaaacaccatggatgttcaaggtcatggcacacatgttgctggcacgattgcatcttatgggagtgtaagcggagtgatgcagagtgcgacactgatcccggtcaaagtgctcgataattctggcagcgggtccctttacggtattacgcaaggcatattgtatgccgccgacatcgatgcggacgtcattaacatgtctctgggtggaggaggctataatatcagcatggatgaggctgttcaaacagcagttgctatgggaaccattgtagtagcagcgactggcaatgatggtgcatcgtcgatcagttatcctgctgcctacagcagcgtcattgcggtgggatctgtggactccaatcgtgttcgatcctcgttttctaactatggatctgggcttgaagttatggcaccgggcagcaacatctacagtacgtatcctaattccagatatacatctttgagtggtacaagcatggctactccgcacgttgcgggcgtagctgggctcattcgcgcagccaacccagacataagtgtcgcgcaagcccgtcagattctgcgggataccgcgcaagaagcaggatcgttcacacagtacggctatggaatcgtcgatgctcatgccgccgttgttgctgcatccggtggtagcggcggc

SEQ ID NO: 908 - protein, 413 aa, synthetic construct
  REGION 1..413: note = Variant of serine peptidase from Bacillus sinesaloumensis
MADQASQANGNQDVIEGELIVSVEPKNGKPDVSIQSAQSVTGQEDVLKSKGFTIVDTLHVEDSSVKPLVSKNFNKKVVEKMGLVYLVQYSPDQFKSSNIAKKELRKELMDLGFKVRYISENYKMMAIEGTATLQGVHPNQQWHYNMIKAPEAWAITSGSSSVKVAVLDTGIDHNHPSLANFVNTNLGRSFVGGNTMDVQGHGTHVAGTIASYGSVSGVMQSATLIPVKVLDNSGSGSLYGITQGILYAADIDADVINMSLGGGGYNISMDEAVQTAVAMGTIVVAATGNDGASSISYPAAYSSVIAVGSVDSNRVRSSFSNYGSGLEVMAPGSNIYSTYPNSRYTSLSGTSMATPHVAGVAGLIRAANPDISVAQARQILRDTAQEAGSFTQYGYGIVDAHAAVVAASGGSGG

SEQ ID NO: 909 - DNA, 1239 bp, synthetic construct
  misc_feature 1..1239: note = Variant of serine peptidase from Bacillus sinesaloumensis
  source 1..1239: mol_type = other DNA
atggcagatcaagctagtcaagctaatggaaaccaggacgtcattgaaggcgagctgatcgtttcagtggaaccgaagaacggtaaacctgatgtgagcattcaaagtgcacaatccgtaacagggcaggaagacgtccttaaatcgaaaggctttacgatcgttgataccttgcatgtagaggatagcagcgtcaagccactcgtctcgaagaatttcaataagaaagtggtggagaagatgggactggtgtatcttgttcaatactctccggaccagtttaaaagttccaacattgcgaagaaagaactcagaaaagaattgatggatctgggctttaaagtccgctatataagcgaaaattacaagatgatggcgatcgaaggtacagccactcttcaggaggtgcaccctaaccaagtttggcattataatatgattaaagctccggaagcgtgggctattacgtctggatcctcgagcgttaaagtagcagtcctggatacagggatcgaccataatcacccatccttggccaacttcgtgaatactaatcttggccgctcgtttgttggaggaaacaccatggatgttcaaggtcatggcacacatgttgctggcacgattgcatcttatgggagtgtaagcggagtgatgcagagtgcgacactgatcccggtcaaagtgctcgataattctggcagcgggtccctttacggtattacgcaaggcatattgtatgccgccgacatcgatgcggacgtcattaacatgtctctgggtggaggaggctataatcagagcatggatgaggctgttcaaacagcagttgctcagggaaccattgtagtagcagcgactggcaatgatggtgcatcgtcgatcagttatcctgctgcctacagcagcgtcattgcggtgggatctgtggactccaatcgtgttcgatcctcgttttctaactatggatctgggcttgaagttatggcaccgggcagcaacatctacagtacgtatcctaattccagatatacatctttgagtggtacaagcatggctactccgcacgttgcgggcgtagctgggctcattcgcgcagccaacccagacatagtggtcgcgcaagcccgtcagattctgcgggataccgcgcaagaagcaggatcgttcacacagtacggctatggaatcgtcgatgctcatgccgccgttgttgctgcatccggtggtagcggcggc

SEQ ID NO: 910 - protein, 413 aa, synthetic construct
  REGION 1..413: note = Variant of serine peptidase from Bacillus sinesaloumensis
MADQASQANGNQDVIEGELIVSVEPKNGKPDVSIQSAQSVTGQEDVLKSKGFTIVDTLHVEDSSVKPLVSKNFNKKVVEKMGLVYLVQYSPDQFKSSNIAKKELRKELMDLGFKVRYISENYKMMAIEGTATLQEVHPNQVWHYNMIKAPEAWAITSGSSSVKVAVLDTGIDHNHPSLANFVNTNLGRSFVGGNTMDVQGHGTHVAGTIASYGSVSGVMQSATLIPVKVLDNSGSGSLYGITQGILYAADIDADVINMSLGGGGYNQSMDEAVQTAVAQGTIVVAATGNDGASSISYPAAYSSVIAVGSVDSNRVRSSFSNYGSGLEVMAPGSNIYSTYPNSRYTSLSGTSMATPHVAGVAGLIRAANPDIVVAQARQILRDTAQEAGSFTQYGYGIVDAHAAVVAASGGSGG

SEQ ID NO: 911 - DNA, 1239 bp, synthetic construct
  misc_feature 1..1239: note = Variant of serine peptidase from Bacillus sinesaloumensis
  source 1..1239: mol_type = other DNA
atggcagatcaagctagtcaagctaatggaaaccaggacgtcattgaaggcgagctgatcgtttcagtggaaccgaagaacggtaaacctgatgtgagcattcaaagtgcacaatccgtaacagggcaggaagacgtccttaaatcgaaaggctttacgatcgttgataccttgcatgtagaggatagcagcgtcaagccactcgtctcgaagaatttcaataagaaagtggtggagaagatgggactggtgtatcttgttcaatactctccggaccagtttaaaagttccaacattgcgaagaaagaactcagaaaagaattgatggatctgggctttaaagtccgctatataagcgaaaattacaagatgatggcgatcgaaggtacagccactcttcaggaggtgcaccctaaccaacaatggcattataatatgattaaagctccggaagcgtgggctattacgtctggatccctgagcgttaaagtagcagtcctggatacagggatcgaccataatcacccatccttggccaacttcgtgaatactaatcttggccggtcgtttgttggaggaaacaccatggatgttcaaggtcatggcacacatgttgctggcacgattgcatcttatgggagtgtaagcggagtgatgcagagtgcgacactgatcccggtcaaagtgctcgataattctggcagcgggtccctttacggtattacgcaaggcatattgtatgccgccgacatcgatgcggacgtcattaacatgtctctgggtggaggaggctataatcagagcatggatgaggctgttcaaacagcagttgctcagggaaccattgtagtagcagcgactggcaatgatggtgcatcgtcgatcagttatcctgctgcctacagcagcgtcattgcggtgggatctgtgacgtccaatcgtacacgatcctcgttttctaactatggatctgggcttgaagttatggcaccgggcagcaacatctacagtacgtatcctaattccagatatacatctttgagtggtacaagcatggctactccgcacgttgcgggcgtagctgggctcattcgcgcagccaacccagacatatctgtcgcgcaagcccgtcagattctgcgggataccgcgcaagaagcaggatcgttcacacagtacggctatggaatcgtcgatgctcatgccgccgttgttgctgcatccggtggtagcggcggc

SEQ ID NO: 912 - protein, 413 aa, synthetic construct
  REGION 1..413: note = Variant of serine peptidase from Bacillus sinesaloumensis
MADQASQANGNQDVIEGELIVSVEPKNGKPDVSIQSAQSVTGQEDVLKSKGFTIVDTLHVEDSSVKPLVSKNFNKKVVEKMGLVYLVQYSPDQFKSSNIAKKELRKELMDLGFKVRYISENYKMMAIEGTATLQEVHPNQQWHYNMIKAPEAWAITSGSLSVKVAVLDTGIDHNHPSLANFVNTNLGRSFVGGNTMDVQGHGTHVAGTIASYGSVSGVMQSATLIPVKVLDNSGSGSLYGITQGILYAADIDADVINMSLGGGGYNQSMDEAVQTAVAQGTIVVAATGNDGASSISYPAAYSSVIAVGSVTSNRTRSSFSNYGSGLEVMAPGSNIYSTYPNSRYTSLSGTSMATPHVAGVAGLIRAANPDISVAQARQILRDTAQEAGSFTQYGYGIVDAHAAVVAASGGSGG

SEQ ID NO: 913 - DNA, 1239 bp, synthetic construct
  misc_feature 1..1239: note = Variant of serine peptidase from Bacillus sinesaloumensis
  source 1..1239: mol_type = other DNA
atggcagatcaagctagtcaagctaatggaaaccaggacgtcattgaaggcgagctgatcgtttcagtggaaccgaagaacggtaaacctgatgtgagcattcaaagtgcacaatccgtaacagggcaggaagacgtccttaaatcgaaaggctttacgatcgttgataccttgcatgtagaggatagcagcgtcaagccactcgtctcgaagaatttcaataagaaagtggtggagaagatgggactggtgtatcttgttcaatactctccggaccagtttaaaagttccaacattgcgaagaaagaactcagaaaagaattgatggatctgggctttaaagtccgctatataagcgaaaattacaagatgatggcgatcgaaggtacagccactcttcagggggtgcaccctaaccaacaatggcattataatatgattaaagctccggaagcgtgggctattacgtctggatcctcgagcgttaaagtagcagtcctggatacagggatcgaccataatcacccatccttggccaacttcgtgaatactaatcttggccgctcgtttgttggaggaaacaccatggatgttcaaggtcatggcacacatgttgctggcacgattgcatcttatgggagtgtaagcggagtgatgcagagtgcgacactgatcccggtcaaagtgctcgataattctggcagcgggtccctttacggtattacgcaaggcatattgtatgccgccgacatcgatgcggacgtcattaacatgtctctgggtggaggaggctataatcagagcatggatgaggctgttcaaacagcagttgctcagggaaccattgtagtagcagcgactggcaatgatggtgcatcgtcgatcagttatcctgctgcctacagcagcgtcattgcggtgggatctgtggactccaatcgtgttcgatcctcgttttctaactatggatctgggcttgaagttatggcaccgggcagcaacatctacagtacgtatcctaattccagatatacatctttgagtggtacaagcatggctactccgcacgttgcgggcgtagctgggctcattcgcgcagccaacccagacataagtgtcgcgcaagcccgtcagattctgcgggataccgcgcaagaagcaggatcgttcacacagtacggctatggaatcgtcgatgctcatgccgccgttgttgctgcatccggtggtagcggcggc

SEQ ID NO: 914 - protein, 413 aa, synthetic construct
  REGION 1..413: note = Variant of serine peptidase from Bacillus sinesaloumensis
MADQASQANGNQDVIEGELIVSVEPKNGKPDVSIQSAQSVTGQEDVLKSKGFTIVDTLHVEDSSVKPLVSKNFNKKVVEKMGLVYLVQYSPDQFKSSNIAKKELRKELMDLGFKVRYISENYKMMAIEGTATLQGVHPNQQWHYNMIKAPEAWAITSGSSSVKVAVLDTGIDHNHPSLANFVNTNLGRSFVGGNTMDVQGHGTHVAGTIASYGSVSGVMQSATLIPVKVLDNSGSGSLYGITQGILYAADIDADVINMSLGGGGYNQSMDEAVQTAVAQGTIVVAATGNDGASSISYPAAYSSVIAVGSVDSNRVRSSFSNYGSGLEVMAPGSNIYSTYPNSRYTSLSGTSMATPHVAGVAGLIRAANPDISVAQARQILRDTAQEAGSFTQYGYGIVDAHAAVVAASGGSGG

SEQ ID NO: 915 - DNA, 1239 bp, synthetic construct
  misc_feature 1..1239: note = Variant of serine peptidase from Bacillus sinesaloumensis
  source 1..1239: mol_type = other DNA
atggcagatcaagctagtcaagctaatggaaaccaggacgtcattgaaggcgagctgatcgtttcagtggaaccgaagaacggtaaacctgatgtgagcattcaaagtgcacaatccgtaacagggcaggaagacgtccttaaatcgaaaggctttacgatcgttgataccttgcatgtagaggatagcagcgtcaagccactcgtctcgaagaatttcaataagaaagtggtggagaagatgggactggtgtatcttgttcaatactctccggaccagtttaaaagttccaacattgcgaagaaagaactcagaaaagaattgatggatctgggctttaaagtccgctatataagcgaaaattacaagatgatggcgatcgaaggtacagccactcttcagggggtgcaccctaaccaagtttggcattataatatgattaaagctccggaagcgtgggctattacgtctggatccctgagcgttaaagtagcagtcctggatacagggatcgaccataatcacccatccttggccaacttcgtgaatactaatcttggccgctcgtttgttggaggaaacaccatggatgttcaaggtcatggcacacatgttgctggcacgattgcatcttatgggagtgtaagcggagtgatgcagagtgcgacactgatcccggtcaaagtgctcgataattctggcagcgggtccctttacggtattacgcaaggcatattgtatgccgccgacatcgatgcggacgtcattaacatgtctctgggtggaggaggctataatcagagcatggatgaggctgttcaaacagcagttgctcagggaaccattgtagtagcagcgactggcaatgatggtgcatcgtcgatcagttatcctgctgcctacagcagcgtcattgcggtgggatctgtggactccaatcgtgttcgatcctcgttttctaactatggatctgggcttgaagttatggcaccgggcagcaacatctacagtacgtatcctaattccagatatacatctttgagtggtacaagcatggctactccgcacgttgcgggcgtagctgggctcattcgcgcagccaacccagacatagtggtcgcgcaagcccgtcagattctgcgggataccgcgcaagaagcaggatcgttcacacagtacggctatggaatcgtcgatgctcatgccgccgttgttgctgcatccggtggtagcggcggc

SEQ ID NO: 916 - protein, 413 aa, synthetic construct
  REGION 1..413: note = Variant of serine peptidase from Bacillus sinesaloumensis
MADQASQANGNQDVIEGELIVSVEPKNGKPDVSIQSAQSVTGQEDVLKSKGFTIVDTLHVEDSSVKPLVSKNFNKKVVEKMGLVYLVQYSPDQFKSSNIAKKELRKELMDLGFKVRYISENYKMMAIEGTATLQGVHPNQVWHYNMIKAPEAWAITSGSLSVKVAVLDTGIDHNHPSLANFVNTNLGRSFVGGNTMDVQGHGTHVAGTIASYGSVSGVMQSATLIPVKVLDNSGSGSLYGITQGILYAADIDADVINMSLGGGGYNQSMDEAVQTAVAQGTIVVAATGNDGASSISYPAAYSSVIAVGSVDSNRVRSSFSNYGSGLEVMAPGSNIYSTYPNSRYTSLSGTSMATPHVAGVAGLIRAANPDIVVAQARQILRDTAQEAGSFTQYGYGIVDAHAAVVAASGGSGG

SEQ ID NO: 917 - DNA, 1239 bp, synthetic construct
  misc_feature 1..1239: note = Variant of serine peptidase from Bacillus sinesaloumensis
  source 1..1239: mol_type = other DNA
atggcagatcaagctagtcaagctaatggaaaccaggacgtcattgaaggcgagctgatcgtttcagtggaaccgaagaacggtaaacctgatgtgagcattcaaagtgcacaatccgtaacagggcaggaagacgtccttaaatcgaaaggctttacgatcgttgataccttgcatgtagaggatagcagcgtcaagccactcgtctcgaagaatttcaataagaaagtggtggagaagatgggactggtgtatcttgttcaatactctccggaccagtttaaaagttccaacattgcgaagaaagaactcagaaaagaattgatggatctgggctttaaagtccgctatataagcgaaaattacaagatgatggcgatcgaaggtacagccactcttcagggggtgcaccctaaccaagtttggcattataatatgattaaagctccggaagcgtgggctattacgtctggatccctgagcgttaaagtagcagtcctggatacagggatcgaccataatcacccatccttggccaacttcgtgaatactaatcttggccggtcgtttgttggaggaaacaccatggatgttcaaggtcatggcacacatgttgctggcacgattgcatcttatgggagtgtaagcggagtgatgcagagtgcgacactgatcccggtcaaagtgctcgataattctggcagcgggtccctttacggtattacgcaaggcatattgtatgccgccgacatcgatgcggacgtcattaacatgtctctgggtggaggaggctataatcagagcatggatgaggctgttcaaacagcagttgctcagggaaccattgtagtagcagcgactggcaatgatggtgcatcgtcgatcagttatcctgctgcctacagcagcgtcattgcggtgggatctgtggactccaatcgtgttcgatcctcgttttctaactatggatctgggcttgaagttatggcaccgggcagcaacatctacagtacgtatcctaattccagatatacatctttgagtggtacaagcatggctactccgcacgttgcgggcgtagctgggctcattcgcgcagccaacccagacataagtgtcgcgcaagcccgtcagattctgcgggataccgcgcaagaagcaggatcgttcacacagtacggctatggaatcgtcgatgctcatgccgccgttgttgctgcatccggtggtagcggcggc

SEQ ID NO: 918 - protein, 413 aa, synthetic construct
  REGION 1..413: note = Variant of serine peptidase from Bacillus sinesaloumensis
MADQASQANGNQDVIEGELIVSVEPKNGKPDVSIQSAQSVTGQEDVLKSKGFTIVDTLHVEDSSVKPLVSKNFNKKVVEKMGLVYLVQYSPDQFKSSNIAKKELRKELMDLGFKVRYISENYKMMAIEGTATLQGVHPNQVWHYNMIKAPEAWAITSGSLSVKVAVLDTGIDHNHPSLANFVNTNLGRSFVGGNTMDVQGHGTHVAGTIASYGSVSGVMQSATLIPVKVLDNSGSGSLYGITQGILYAADIDADVINMSLGGGGYNQSMDEAVQTAVAQGTIVVAATGNDGASSISYPAAYSSVIAVGSVDSNRVRSSFSNYGSGLEVMAPGSNIYSTYPNSRYTSLSGTSMATPHVAGVAGLIRAANPDISVAQARQILRDTAQEAGSFTQYGYGIVDAHAAVVAASGGSGG

SEQ ID NO: 919 - DNA, 1239 bp, synthetic construct
  misc_feature 1..1239: note = Variant of serine peptidase from Bacillus sinesaloumensis
  source 1..1239: mol_type = other DNA
atggcagatcaagctagtcaagctaatggaaaccaggacgtcattgaaggcgagctgatcgtttcagtggaaccgaagaacggtaaacctgatgtgagcattcaaagtgcacaatccgtaacagggcaggaagacgtccttaaatcgaaaggctttacgatcgttgataccttgcatgtagaggatagcagcgtcaagccactcgtctcgaagaatttcaataagaaagtggtggagaagatgggactggtgtatcttgttcaatactctccggaccagtttaaaagttccaacattgcgaagaaagaactcagaaaagaattgatggatctgggctttaaagtccgctatataagcgaaaattacaagatgatggcgatcgaaggtacagccactcttcagggggtgcaccctaaccaacaatggcattataatatgattaaagctccggaagcgtgggctattacgtctggatcctcgagcgttaaagtagcagtcctggatacagggatcgaccataatcacccatccttggccaacttcgtgaatactaatcttggccggtcgtttgttggaggaaacaccatggatgttcaaggtcatggcacacatgttgctggcacgattgcatcttatgggagtgtaagcggagtgatgcagagtgcgacactgatcccggtcaaagtgctcgataattctggcagcgggtccctttacggtattacgcaaggcatattgtatgccgccgacatcgatgcggacgtcattaacatgtctctgggtggaggaggctataatatcagcatggatgaggctgttcaaacagcagttgctcagggaaccattgtagtagcagcgactggcaatgatggtgcatcgtcgatcagttatcctgctgcctacagcagcgtcattgcggtgggatctgtggactccaatcgtgttcgatcctcgttttctaactatggatctgggcttgaagttatggcaccgggcagcaacatctacagtacgtatcctaattccagatatacatctttgagtggtacaagcatggctactccgcacgttgcgggcgtagctgggctcattcgcgcagccaacccagacatactggtcgcgcaagcccgtcagattctgcgggataccgcgcaagaagcaggatcgttcacacagtacggctatggaatcgtcgatgctcatgccgccgttgttgctgcatccggtggtagcggcggc

SEQ ID NO: 920 - protein, 413 aa, synthetic construct
  REGION 1..413: note = Variant of serine peptidase from Bacillus sinesaloumensis
MADQASQANGNQDVIEGELIVSVEPKNGKPDVSIQSAQSVTGQEDVLKSKGFTIVDTLHVEDSSVKPLVSKNFNKKVVEKMGLVYLVQYSPDQFKSSNIAKKELRKELMDLGFKVRYISENYKMMAIEGTATLQGVHPNQQWHYNMIKAPEAWAITSGSSSVKVAVLDTGIDHNHPSLANFVNTNLGRSFVGGNTMDVQGHGTHVAGTIASYGSVSGVMQSATLIPVKVLDNSGSGSLYGITQGILYAADIDADVINMSLGGGGYNISMDEAVQTAVAQGTIVVAATGNDGASSISYPAAYSSVIAVGSVDSNRVRSSFSNYGSGLEVMAPGSNIYSTYPNSRYTSLSGTSMATPHVAGVAGLIRAANPDILVAQARQILRDTAQEAGSFTQYGYGIVDAHAAVVAASGGSGG

SEQ ID NO: 921 - DNA, 1239 bp, synthetic construct
  misc_feature 1..1239: note = Variant of serine peptidase from Bacillus sinesaloumensis
  source 1..1239: mol_type = other DNA
atggcagatcaagctagtcaagctaatggaaaccaggacgtcattgaaggcgagctgatcgtttcagtggaaccgaagaacggtaaacctgatgtgagcattcaaagtgcacaatccgtaacagggcaggaagacgtccttaaatcgaaaggctttacgatcgttgataccttgcatgtagaggatagcagcgtcaagccactcgtctcgaagaatttcaataagaaagtggtggagaagatgggactggtgtatcttgttcaatactctccggaccagtttaaaagttccaacattgcgaagaaagaactcagaaaagaattgatggatctgggctttaaagtccgctatataagcgaaaattacaagatgatggcgatcgaaggtacagccactcttcaggggatgcaccctaaccaagtttggcattataatatgattaaagctccggaagcgtgggctattacgtctggatcctctagcgttaaagtagcagtcctggatacagggatcgaccataatcacccatccttggccaacttcgtgaatactaatcttggcatgtcgtttgttggaggaaacaccatggatgttcaaggtcatggcacacatgttgctggcacgattgcatcttatgggagtgtaagcggagtgatgcagagtgcgacactgatcccggtcaaagtgctcgataattctggcagcgggtccctttacggtattacgcaaggcatattgtatgccgccgacatcgatgcggacgtcattaacatgtctctgggtggaggaggctataatcagagcatggatgaggctgttcaaacagcagttgctcagggaaccattgtagtagcagcgactggcaatgatggtgcatcgtcgatcagttatcctgctgcctacagcagcgtcattgcggtgggatctgtggactccaatcgtacccgatcctcgttttctaactatggatctgggcttgaagttatggcaccgggcagcaacatctacagtacgtatcctaattccagatatacatctttgagtggtacaagcatggctactccgcacgttgcgggcgtagctgggctcattcgcgcagccaacccagacataagtgtcgcgcaagcccgtcagattctgcgggataccgcgcaagaagcaggatcgttcacacagtacggctatggaatcgtcgatgctcatgccgccgttgttgctgcatccggtggtagcggcggc

SEQ ID NO: 922 - protein, 413 aa, synthetic construct
  REGION 1..413: note = Variant of serine peptidase from Bacillus sinesaloumensis
MADQASQANGNQDVIEGELIVSVEPKNGKPDVSIQSAQSVTGQEDVLKSKGFTIVDTLHVEDSSVKPLVSKNFNKKVVEKMGLVYLVQYSPDQFKSSNIAKKELRKELMDLGFKVRYISENYKMMAIEGTATLQGMHPNQVWHYNMIKAPEAWAITSGSSSVKVAVLDTGIDHNHPSLANFVNTNLGMSFVGGNTMDVQGHGTHVAGTIASYGSVSGVMQSATLIPVKVLDNSGSGSLYGITQGILYAADIDADVINMSLGGGGYNQSMDEAVQTAVAQGTIVVAATGNDGASSISYPAAYSSVIAVGSVDSNRTRSSFSNYGSGLEVMAPGSNIYSTYPNSRYTSLSGTSMATPHVAGVAGLIRAANPDISVAQARQILRDTAQEAGSFTQYGYGIVDAHAAVVAASGGSGG

SEQ ID NO: 923 - DNA, 1239 bp, synthetic construct
  misc_feature 1..1239: note = Variant of serine peptidase from Bacillus sinesaloumensis
  source 1..1239: mol_type = other DNA
atggcagatcaagctagtcaagctaatggaaaccaggacgtcattgaaggcgagctgatcgtttcagtggaaccgaagaacggtaaacctgatgtgagcattcaaagtgcacaatccgtaacagggcaggaagacgtccttaaatcgaaaggctttacgatcgttgataccttgcatgtagaggatagcagcgtcaagccactcgtctcgaagaatttcaataagaaagtggtggagaagatgggactggtgtatcttgttcaatactctccggaccagtttaaaagttccaacattgcgaagaaagaactcagaaaagaattgatggatctgggctttaaagtccgctatataagcgaaaattacaagatgatggcgatcgaaggtacagccactcttcaggcggtgcaccctaaccaagtttggcattataatatgattaaagctccggaagcgtgggctattacgtctggatccctgagcgttaaagtagcagtcctggatacagggatcgaccataatcacccatccttggccaacttcgtgaatactaatcttggccggtcgtttgttggaggaaacaccatggatgttcaaggtcatggcacacatgttgctggcacgattgcatcttatgggagtgtaagcggagtgatgcagagtgcgacactgatcccggtcaaagtgctcgataattctggcagcgggtccctttacggtattacgcaaggcatattgtatgccgccgacatcgatgcggacgtcattaacatgtctctgggtggaggaggctataatcagagcatggatgaggctgttcaaacagcagttgctcagggaaccattgtagtagcagcgactggcaatgatggtgcatcgtcgatcagttatcctgctgcctacagcagcgtcattgcggtgggatctgtggactccaatcgtacccgatcctcgttttctaactatggatctgggcttgaagttatggcaccgggcagcaacatctacagtacgtatcctaattccagatatacatctttgagtggtacaagcatggctactccgcacgttgcgggcgtagctgggctcattcgcgcagccaacccagacatatctgtcgcgcaagcccgtcagattctgcgggataccgcgcaagaagcaggatcgttcacacagtacggctatggaatcgtcgatgctcatgccgccgttgttgctgcatccggtggtagcggcggc

SEQ ID NO: 924 - protein, 413 aa, synthetic construct
  REGION 1..413: note = Variant of serine peptidase from Bacillus sinesaloumensis
MADQASQANGNQDVIEGELIVSVEPKNGKPDVSIQSAQSVTGQEDVLKSKGFTIVDTLHVEDSSVKPLVSKNFNKKVVEKMGLVYLVQYSPDQFKSSNIAKKELRKELMDLGFKVRYISENYKMMAIEGTATLQAVHPNQVWHYNMIKAPEAWAITSGSLSVKVAVLDTGIDHNHPSLANFVNTNLGRSFVGGNTMDVQGHGTHVAGTIASYGSVSGVMQSATLIPVKVLDNSGSGSLYGITQGILYAADIDADVINMSLGGGGYNQSMDEAVQTAVAQGTIVVAATGNDGASSISYPAAYSSVIAVGSVDSNRTRSSFSNYGSGLEVMAPGSNIYSTYPNSRYTSLSGTSMATPHVAGVAGLIRAANPDISVAQARQILRDTAQEAGSFTQYGYGIVDAHAAVVAASGGSGG

SEQ ID NO: 925 - DNA, 1239 bp, synthetic construct
  misc_feature 1..1239: note = Variant of serine peptidase from Bacillus sinesaloumensis
  source 1..1239: mol_type = other DNA
atggcagatcaagctagtcaagctaatggaaaccaggacgtcattgaaggcgagctgatcgtttcagtggaaccgaagaacggtaaacctgatgtgagcattcaaagtgcacaatccgtaacagggcaggaagacgtccttaaatcgaaaggctttacgatcgttgataccttgcatgtagaggatagcagcgtcaagccactcgtctcgaagaatttcaataagaaagtggtggagaagatgggactggtgtatcttgttcaatactctccggaccagtttaaaagttccaacattgcgaagaaagaactcagaaaagaattgatggatctgggctttaaagtccgctatataagcgaaaattacaagatgatggcgatcgaaggtacagccactcttcaggaggtgcaccctaaccaagtttggcattataatatgattaaagctccggaagcgtgggctattacgtctggatccctgagcgttaaagtagcagtcctggatacagggatcgaccataatcacccatccttggccaacttcgtgaatactaatcttggccggtcgtttgttggaggaaacaccatggatgttcaaggtcatggcacacatgttgctggcacgattgcatcttatgggagtgtaagcggagtgatgcagagtgcgacactgatcccggtcaaagtgctcgataattctggcagcgggtccctttacggtattacgcaaggcatattgtatgccgccgacatcgatgcggacgtcattaacatgtctctgggtggaggaggctataatcagagcatggatgaggctgttcaaacagcagttgctatgggaaccattgtagtagcagcgactggcaatgatggtgcatcgtcgatcagttatcctgctgcctacagcagcgtcattgcggtgggatctgtggactccaatcgtgttcgatcctcgttttctaactatggatctgggcttgaagttatggcaccgggcagcaacatctacagtacgtatcctaattccagatatacatctttgagtggtacaagcatggctactccgcacgttgcgggcgtagctgggctcattcgcgcagccaacccagacatactggtcgcgcaagcccgtcagattctgcgggataccgcgcaagaagcaggatcgttcacacagtacggctatggaatcgtcgatgctcatgccgccgttgttgctgcatccggtggtagcggcggc

SEQ ID NO: 926 - protein, 413 aa, synthetic construct
  REGION 1..413: note = Variant of serine peptidase from Bacillus sinesaloumensis
MADQASQANGNQDVIEGELIVSVEPKNGKPDVSIQSAQSVTGQEDVLKSKGFTIVDTLHVEDSSVKPLVSKNFNKKVVEKMGLVYLVQYSPDQFKSSNIAKKELRKELMDLGFKVRYISENYKMMAIEGTATLQEVHPNQVWHYNMIKAPEAWAITSGSLSVKVAVLDTGIDHNHPSLANFVNTNLGRSFVGGNTMDVQGHGTHVAGTIASYGSVSGVMQSATLIPVKVLDNSGSGSLYGITQGILYAADIDADVINMSLGGGGYNQSMDEAVQTAVAMGTIVVAATGNDGASSISYPAAYSSVIAVGSVDSNRVRSSFSNYGSGLEVMAPGSNIYSTYPNSRYTSLSGTSMATPHVAGVAGLIRAANPDILVAQARQILRDTAQEAGSFTQYGYGIVDAHAAVVAASGGSGG

SEQ ID NO: 927 - DNA, 1239 bp, synthetic construct
  misc_feature 1..1239: note = Variant of serine peptidase from Bacillus sinesaloumensis
  source 1..1239: mol_type = other DNA
atggcagatcaagctagtcaagctaatggaaaccaggacgtcattgaaggcgagctgatcgtttcagtggaaccgaagaacggtaaacctgatgtgagcattcaaagtgcacaatccgtaacagggcaggaagacgtccttaaatcgaaaggctttacgatcgttgataccttgcatgtagaggatagcagcgtcaagccactcgtctcgaagaatttcaataagaaagtggtggagaagatgggactggtgtatcttgttcaatactctccggaccagtttaaaagttccaacattgcgaagaaagaactcagaaaagaattgatggatctgggctttaaagtccgctatataagcgaaaattacaagatgatggcgatcgaaggtacagccactcttcaggcggtgcaccctaaccaagtttggcattataatatgattaaagctccggaagcgtgggctattacgtctggatccctgagcgttaaagtagcagtcctggatacagggatcgaccataatcacccatccttggccaacttcgtgaatactgaacttggccgctcgtttgttggaggaaacaccatggatgttcaaggtcatggcacacatgttgctggcacgattgcatcttatgggagtgtaagcggagtgatgcagagtgcgacactgatcccggtcaaagtgctcgataattctggcagcgggtccctttacggtattacgcaaggcatattgtatgccgccgacatcgatgcggacgtcattaacatgtctctgggtggaggaggctataatcagagcatggatgaggctgttcaaacagcagttgctatgggaaccattgtagtagcagcgactggcaatgatggtgcatcgtcgatcagttatcctgctgcctacagcagcgtcattgcggtgggatctgtggactccaatcgtacccgatcctcgttttctaactatggatctgggcttgaagttatggcaccgggcagcaacatctacagtacgtatcctaattccagatatacatctttgagtggtacaagcatggctactccgcacgttgcgggcgtagctgggctcattcgcgcagccaacccagacatagtggtcgcgcaagcccgtcagattctgcgggataccgcgcaagaagcaggatcgttcacacagtacggctatggaatcgtcgatgctcatgccgccgttgttgctgcatccggtggtagcggcggc

SEQ ID NO: 928 - protein, 413 aa, synthetic construct
  REGION 1..413: note = Variant of serine peptidase from Bacillus sinesaloumensis
MADQASQANGNQDVIEGELIVSVEPKNGKPDVSIQSAQSVTGQEDVLKSKGFTIVDTLHVEDSSVKPLVSKNFNKKVVEKMGLVYLVQYSPDQFKSSNIAKKELRKELMDLGFKVRYISENYKMMAIEGTATLQAVHPNQVWHYNMIKAPEAWAITSGSLSVKVAVLDTGIDHNHPSLANFVNTELGRSFVGGNTMDVQGHGTHVAGTIASYGSVSGVMQSATLIPVKVLDNSGSGSLYGITQGILYAADIDADVINMSLGGGGYNQSMDEAVQTAVAMGTIVVAATGNDGASSISYPAAYSSVIAVGSVDSNRTRSSFSNYGSGLEVMAPGSNIYSTYPNSRYTSLSGTSMATPHVAGVAGLIRAANPDIVVAQARQILRDTAQEAGSFTQYGYGIVDAHAAVVAASGGSGG

SEQ ID NO: 929 - DNA, 1239 bp, synthetic construct
  misc_feature 1..1239: note = Variant of serine peptidase from Bacillus sinesaloumensis
  source 1..1239: mol_type = other DNA
atggcagatcaagctagtcaagctaatggaaaccaggacgtcattgaaggcgagctgatcgtttcagtggaaccgaagaacggtaaacctgatgtgagcattcaaagtgcacaatccgtaacagggcaggaagacgtccttaaatcgaaaggctttacgatcgttgataccttgcatgtagaggatagcagcgtcaagccactcgtctcgaagaatttcaataagaaagtggtggagaagatgggactggtgtatcttgttcaatactctccggaccagtttaaaagttccaacattgcgaagaaagaactcagaaaagaattgatggatctgggctttaaagtccgctatataagcgaaaattacaagatgatggcgatcgaaggtacagccactcttcaggaggtgcaccctaaccaagtttggcattataatatgattaaagctccggaagcgtgggctattacgtctggatcctcgagcgttaaagtagcagtcctggatacagggatcgaccataatcacccatccttggccaacttcgtgaatactaatcttggccggtcgtttgttggaggaaacaccatggatgttcaaggtcatggcacacatgttgctggcacgattgcatcttatgggagtgtaagcggagtgatgcagagtgcgacactgatcccggtcaaagtgctcgataattctggcagcgggtccctttacggtattacgcaaggcatattgtatgccgccgacatcgatgcggacgtcattaacatgtctctgggtggaggaggctataatcagagcatggatgaggctgttcaaacagcagttgctcagggaaccattgtagtagcagcgactggcaatgatggtgcatcgtcgatcagttatcctgctgcctacagcagcgtcattgcggtgggatctgtggactccaatcgtgttcgatcctcgttttctaactatggatctgggcttgaagttatggcaccgggcagcaacatctacagtacgtatcctaattccagatatacatctttgagtggtacaagcatggctactccgcacgttgcgggcgtagctgggctcattcgcgcagccaacccagacataagtgtcgcgcaagcccgtcagattctgcgggataccgcgcaagaagcaggatcgttcacacagtacggctatggaatcgtcgatgctcatgccgccgttgttgctgcatccggtggtagcggcggc

SEQ ID NO: 930 - protein, 413 aa, synthetic construct
  REGION 1..413: note = Variant of serine peptidase from Bacillus sinesaloumensis
MADQASQANGNQDVIEGELIVSVEPKNGKPDVSIQSAQSVTGQEDVLKSKGFTIVDTLHVEDSSVKPLVSKNFNKKVVEKMGLVYLVQYSPDQFKSSNIAKKELRKELMDLGFKVRYISENYKMMAIEGTATLQEVHPNQVWHYNMIKAPEAWAITSGSSSVKVAVLDTGIDHNHPSLANFVNTNLGRSFVGGNTMDVQGHGTHVAGTIASYGSVSGVMQSATLIPVKVLDNSGSGSLYGITQGILYAADIDADVINMSLGGGGYNQSMDEAVQTAVAQGTIVVAATGNDGASSISYPAAYSSVIAVGSVDSNRVRSSFSNYGSGLEVMAPGSNIYSTYPNSRYTSLSGTSMATPHVAGVAGLIRAANPDISVAQARQILRDTAQEAGSFTQYGYGIVDAHAAVVAASGGSGG

SEQ ID NO: 931 - DNA, 1239 bp, synthetic construct
  misc_feature 1..1239: note = Variant of serine peptidase from Bacillus sinesaloumensis
  source 1..1239: mol_type = other DNA
atggcagatcaagctagtcaagctaatggaaaccaggacgtcattgaaggcgagctgatcgtttcagtggaaccgaagaacggtaaacctgatgtgagcattcaaagtgcacaatccgtaacagggcaggaagacgtccttaaatcgaaaggctttacgatcgttgataccttgcatgtagaggatagcagcgtcaagccactcgtctcgaagaatttcaataagaaagtggtggagaagatgggactggtgtatcttgttcaatactctccggaccagtttaaaagttccaacattgcgaagaaagaactcagaaaagaattgatggatctgggctttaaagtccgctatataagcgaaaattacaagatgatggcgatcgaaggtacagccactcttcaggggatgcaccctaaccaagtttggcattataatatgattaaagctccggaagcgtgggctattacgtctggatccctgagcgttaaagtagcagtcctggatacagggatcgaccataatcacccatccttggccaacttcgtgaatactaatcttggccgctcgtttgttggaggaaacaccatggatgttcaaggtcatggcacacatgttgctggcacgattgcatcttatgggagtgtaagcggagtgatgcagagtgcgacactgatcccggtcaaagtgctcgataattctggcagcgggtccctttacggtattacgcaaggcatattgtatgccgccgacatcgatgcggacgtcattaacatgtctctgggtggaggaggctataatcagagcatggatgaggctgttcaaacagcagttgctcagggaaccattgtagtagcagcgactggcaatgatggtgcatcgtcgatcagttatcctgctgcctacagcagcgtcattgcggtgggatctgtgacttccaatcgtgttcgatcctcgttttctaactatggatctgggcttgaagttatggcaccgggcagcaacatctacagtacgtatcctaattccagatatacatctttgagtggtacaagcatggctactccgcacgttgcgggcgtagctgggctcattcgcgcagccaacccagacatagtggtcgcgcaagcccgtcagattctgcgggataccgcgcaagaagcaggatcgttcacacagtacggctatggaatcgtcgatgctcatgccgccgttgttgctgcatccggtggtagcggcggc

SEQ ID NO: 932 - protein, 413 aa, synthetic construct
  REGION 1..413: note = Variant of serine peptidase from Bacillus sinesaloumensis
MADQASQANGNQDVIEGELIVSVEPKNGKPDVSIQSAQSVTGQEDVLKSKGFTIVDTLHVEDSSVKPLVSKNFNKKVVEKMGLVYLVQYSPDQFKSSNIAKKELRKELMDLGFKVRYISENYKMMAIEGTATLQGMHPNQVWHYNMIKAPEAWAITSGSLSVKVAVLDTGIDHNHPSLANFVNTNLGRSFVGGNTMDVQGHGTHVAGTIASYGSVSGVMQSATLIPVKVLDNSGSGSLYGITQGILYAADIDADVINMSLGGGGYNQSMDEAVQTAVAQGTIVVAATGNDGASSISYPAAYSSVIAVGSVTSNRVRSSFSNYGSGLEVMAPGSNIYSTYPNSRYTSLSGTSMATPHVAGVAGLIRAANPDIVVAQARQILRDTAQEAGSFTQYGYGIVDAHAAVVAASGGSGG

SEQ ID NO: 933 - DNA, 1239 bp, synthetic construct
  misc_feature 1..1239: note = Variant of serine peptidase from Bacillus sinesaloumensis
  source 1..1239: mol_type = other DNA
atggcagatcaagctagtcaagctaatggaaaccaggacgtcattgaaggcgagctgatcgtttcagtggaaccgaagaacggtaaacctgatgtgagcattcaaagtgcacaatccgtaacagggcaggaagacgtccttaaatcgaaaggctttacgatcgttgataccttgcatgtagaggatagcagcgtcaagccactcgtctcgaagaatttcaataagaaagtggtggagaagatgggactggtgtatcttgttcaatactctccggaccagtttaaaagttccaacattgcgaagaaagaactcagaaaagaattgatggatctgggctttaaagtccgctatataagcgaaaattacaagatgatggcgatcgaaggtacagccactcttcaggaggtgcaccctaaccaagtttggcattataatatgattaaagctccggaagcgtgggctattacgtctggatccctgagcgttaaagtagcagtcctggatacagggatcgaccataatcacccatccttggccaacttcgtgaatactaatcttggccgctcgtttgttggaggaaacaccatggatgttcaaggtcatggcacacatgttgctggcacgattgcatcttatgggagtgtaagcggagtgatgcagagtgcgacactgatcccggtcaaagtgctcgataattctggcagcgggtccctttacggtattacgcaaggcatattgtatgccgccgacatcgatgcggacgtcattaacatgtctctgggtggaggaggctataatcagagcatggatgaggctgttcaaacagcagttgctcagggaaccattgtagtagcagcgactggcaatgatggtgcatcgtcgatcagttatcctgctgcctacagcagcgtcattgcggtgggatctgtgacgtccaatcgtacacgatcctcgttttctaactatggatctgggcttgaagttatggcaccgggcagcaacatctacagtacgtatcctaattccagatatacatctttgagtggtacaagcatggctactccgcacgttgcgggcgtagctgggctcattcgcgcagccaacccagacataagtgtcgcgcaagcccgtcagattctgcgggataccgcgcaagaagcaggatcgttcacacagtacggctatggaatcgtcgatgctcatgccgccgttgttgctgcatccggtggtagcggcggc

SEQ ID NO: 934 - protein, 413 aa, synthetic construct
  REGION 1..413: note = Variant of serine peptidase from Bacillus sinesaloumensis
MADQASQANGNQDVIEGELIVSVEPKNGKPDVSIQSAQSVTGQEDVLKSKGFTIVDTLHVEDSSVKPLVSKNFNKKVVEKMGLVYLVQYSPDQFKSSNIAKKELRKELMDLGFKVRYISENYKMMAIEGTATLQEVHPNQVWHYNMIKAPEAWAITSGSLSVKVAVLDTGIDHNHPSLANFVNTNLGRSFVGGNTMDVQGHGTHVAGTIASYGSVSGVMQSATLIPVKVLDNSGSGSLYGITQGILYAADIDADVINMSLGGGGYNQSMDEAVQTAVAQGTIVVAATGNDGASSISYPAAYSSVIAVGSVTSNRTRSSFSNYGSGLEVMAPGSNIYSTYPNSRYTSLSGTSMATPHVAGVAGLIRAANPDISVAQARQILRDTAQEAGSFTQYGYGIVDAHAAVVAASGGSGG

SEQ ID NO: 935 - DNA, 1239 bp, synthetic construct
  misc_feature 1..1239: note = Variant of serine peptidase from Bacillus sinesaloumensis
  source 1..1239: mol_type = other DNA
atggcagatcaagctagtcaagctaatggaaaccaggacgtcattgaaggcgagctgatcgtttcagtggaaccgaagaacggtaaacctgatgtgagcattcaaagtgcacaatccgtaacagggcaggaagacgtccttaaatcgaaaggctttacgatcgttgataccttgcatgtagaggatagcagcgtcaagccactcgtctcgaagaatttcaataagaaagtggtggagaagatgggactggtgtatcttgttcaatactctccggaccagtttaaaagttccaacattgcgaagaaagaactcagaaaagaattgatggatctgggctttaaagtccgctatataagcgaaaattacaagatgatggcgatcgaaggtacagccactcttcaggagatgcaccctaaccaaaactggcattataatatgattaaagctccggaagcgtgggctattacgtctggatccctgagcgttaaagtagcagtcctggatacagggatcgaccataatcacccatccttggccaacttcgtgaatactaatcttggccgctcgtttgttggaggaaacaccatggatgttcaaggtcatggcacacatgttgctggcacgattgcatcttatgggagtgtaagcggagtgatgcagagtgcgacactgatcccggtcaaagtgctcgataattctggcagcgggtccctttacggtattacgcaaggcatattgtatgccgccgacatcgatgcggacgtcattaacatgtctctgggtggaggaggctataatcagagcatggatgaggctgttcaaacagcagttgctatgggaaccattgtagtagcagcgactggcaatgatggtgcatcgtcgatcagttatcctgctgcctacagcagcgtcattgcggtgggatctgtggactccaatcgtacccgatcctcgttttctaactatggatctgggcttgaagttatggcaccgggcagcaacatctacagtacgtatcctaattccagatatacatctttgagtggtacaagcatggctactccgcacgttgcgggcgtagctgggctcattcgcgcagccaacccagacatagtggtcgcgcaagcccgtcagattctgcgggataccgcgcaagaagcaggatcgttcacacagtacggctatggaatcgtcgatgctcatgccgccgttgttgctgcatccggtggtagcggcggc

SEQ ID NO: 936 - protein, 413 aa, synthetic construct
  REGION 1..413: note = Variant of serine peptidase from Bacillus sinesaloumensis
MADQASQANGNQDVIEGELIVSVEPKNGKPDVSIQSAQSVTGQEDVLKSKGFTIVDTLHVEDSSVKPLVSKNFNKKVVEKMGLVYLVQYSPDQFKSSNIAKKELRKELMDLGFKVRYISENYKMMAIEGTATLQEMHPNQNWHYNMIKAPEAWAITSGSLSVKVAVLDTGIDHNHPSLANFVNTNLGRSFVGGNTMDVQGHGTHVAGTIASYGSVSGVMQSATLIPVKVLDNSGSGSLYGITQGILYAADIDADVINMSLGGGGYNQSMDEAVQTAVAMGTIVVAATGNDGASSISYPAAYSSVIAVGSVDSNRTRSSFSNYGSGLEVMAPGSNIYSTYPNSRYTSLSGTSMATPHVAGVAGLIRAANPDIVVAQARQILRDTAQEAGSFTQYGYGIVDAHAAVVAASGGSGG

SEQ ID NO: 937 - DNA, 1239 bp, synthetic construct
  misc_feature 1..1239: note = Variant of serine peptidase from Bacillus sinesaloumensis
  source 1..1239: mol_type = other DNA
atggcagatcaagctagtcaagctaatggaaaccaggacgtcattgaaggcgagctgatcgtttcagtggaaccgaagaacggtaaacctgatgtgagcattcaaagtgcacaatccgtaacagggcaggaagacgtccttaaatcgaaaggctttacgatcgttgataccttgcatgtagaggatagcagcgtcaagccactcgtctcgaagaatttcaataagaaagtggtggagaagatgggactggtgtatcttgttcaatactctccggaccagtttaaaagttccaacattgcgaagaaagaactcagaaaagaattgatggatctgggctttaaagtccgctatataagcgaaaattacaagatgatggcgatcacgggtactgccactcttcaagcagtacaccctaaccaaaactggcattataatatgattaaagctccggaagcgtgggctattacgtctggatcctctagcgttaaagtagcagtcctggatacagggatcgaccataatcacccatccttggccaacttcgtgaatactaatcttggccggtcgtttgttggaggaaacaccatggatgtgcaaggtcatggcacacatgttgctggcacgattgcatcttatgggagtgtaagcggagtgatgcagagtgcgacactgatcccggtcaaagtgctcgataattctggcagcgggtccctttacggtattacgcaaggcatattgtatgccgccgacatcgatgcggacgtcattaacatgtctctgggtggaggtggctataatcagagcatggatgaggctgttcaaacagcagttgctaagggaaccattgtagtagcagcgactggcaatgatggtgcatcgtcgatcagttatcctgctgcctacagcagcgtcattgcggtgggatctgtgacgattaatcgtacacgatcctcgttttctaactatggatctgggcttgaagttatggcaccgggcagcaacatctacagtacgtatcctaatggcagatatacatctttgagtggtacaagcatggctactccgcacgttgcgggcgtagctgggctcattcgcgcagccaacccagacatatctgtcgcgcaagcccgtcagattctgcgggataccgcgcaagaagcaggatcgttcacacaatacggctatggaatcgtcgatgctcatgccgccgttgttgctgcatccggtggtagcggcggc

SEQ ID NO: 938 - protein, 413 aa, synthetic construct
  REGION 1..413: note = Variant of serine peptidase from Bacillus sinesaloumensis
MADQASQANGNQDVIEGELIVSVEPKNGKPDVSIQSAQSVTGQEDVLKSKGFTIVDTLHVEDSSVKPLVSKNFNKKVVEKMGLVYLVQYSPDQFKSSNIAKKELRKELMDLGFKVRYISENYKMMAITGTATLQAVHPNQNWHYNMIKAPEAWAITSGSSSVKVAVLDTGIDHNHPSLANFVNTNLGRSFVGGNTMDVQGHGTHVAGTIASYGSVSGVMQSATLIPVKVLDNSGSGSLYGITQGILYAADIDADVINMSLGGGGYNQSMDEAVQTAVAKGTIVVAATGNDGASSISYPAAYSSVIAVGSVTINRTRSSFSNYGSGLEVMAPGSNIYSTYPNGRYTSLSGTSMATPHVAGVAGLIRAANPDISVAQARQILRDTAQEAGSFTQYGYGIVDAHAAVVAASGGSGG

SEQ ID NO: 939 - DNA, 1239 bp, synthetic construct
  misc_feature 1..1239: note = Variant of serine peptidase from Bacillus sinesaloumensis
  source 1..1239: mol_type = other DNA
atggcagatcaagctagtcaagctaatggaaaccaggacgtcattgaaggcgagctgatcgtttcagtggaaccgaagaacggtaaacctgatgtgagcattcaaagtgcacaatccgtaacagggcaggaagacgtccttaaatcgaaaggctttacgatcgttgataccttgcatgtagaggatagcagcgtcaagccactcgtctcgaagaatttcaataagaaagtggtggagaagatgggactggtgtatcttgttcaatactctccggaccagtttaaaagttccaacattgcgaagaaagaactcagaaaagaattgatggatctgggctttaaagtccgctatataagcgaaaattacaagatgatggcgatcacgggtactgccactcttcaagcagtacaccctaaccaaaactggcattataatatgattaaagctccggaagcgtgggctattacgtctggatcctctagcgttaaagtagcagtcctggatacagggatcgaccataatcacccatccttggccaacttcgtgaatactaatcttggccggtcgtttgttggaggaaacaccatggatgggcaaggtcatggcacacatgttgctggcacgattgcatcttatgggagtgtaagcggagtgatgcagagtgcgacactgatcccggtcaaagtgctcgataattctggcagcgggtccctttacggtattacgcaaggcatattgtatgccgccgacatcgatgcggacgtcattaacatgtctctgggtggaggtggctataatcagagcatggatgaggctgttcaaacagcagttgctcagggaaccattgtagtagcagcgactggcaatgatggtgcatcgtcgatcagttatcctgctgcctacagcagcgtcattgcggtgggatctgtgacgattaatcgtacacgatcctcgttttctaactatggatctgggcttgaagttatggcaccgggcagcaacatctacagtacgtatcctaatggcagatatacatctttgagtggtacaagcatggctactccgcacgttgcgggcgtagctgggctcattcgcgcagccaacccagacatatctgtcgcgcaagcccgtcagattctgcgggataccgcgcaagaagcaggatcgttcacacaatacggctatggaatcgtcgatgctcatgccgccgttgttgctgcatccggtggtagcggcggc

SEQ ID NO: 940 - protein, 413 aa, synthetic construct
  REGION 1..413: note = Variant of serine peptidase from Bacillus sinesaloumensis
MADQASQANGNQDVIEGELIVSVEPKNGKPDVSIQSAQSVTGQEDVLKSKGFTIVDTLHVEDSSVKPLVSKNFNKKVVEKMGLVYLVQYSPDQFKSSNIAKKELRKELMDLGFKVRYISENYKMMAITGTATLQAVHPNQNWHYNMIKAPEAWAITSGSSSVKVAVLDTGIDHNHPSLANFVNTNLGRSFVGGNTMDGQGHGTHVAGTIASYGSVSGVMQSATLIPVKVLDNSGSGSLYGITQGILYAADIDADVINMSLGGGGYNQSMDEAVQTAVAQGTIVVAATGNDGASSISYPAAYSSVIAVGSVTINRTRSSFSNYGSGLEVMAPGSNIYSTYPNGRYTSLSGTSMATPHVAGVAGLIRAANPDISVAQARQILRDTAQEAGSFTQYGYGIVDAHAAVVAASGGSGG

SEQ ID NO: 941 - DNA, 1239 bp, synthetic construct
  misc_feature 1..1239: note = Variant of serine peptidase from Bacillus sinesaloumensis
  source 1..1239: mol_type = other DNA
atggcagatcaagctagtcaagctaatggaaaccaggacgtcattgaaggcgagctgatcgtttcagtggaaccgaagaacggtaaacctgatgtgagcattcaaagtgcacaatccgtaacagggcaggaagacgtccttaaatcgaaaggctttacgatcgttgataccttgcatgtagaggatagcagcgtcaagccactcgtctcgaagaatttcaataagaaagtggtggagaagatgggactggtgtatcttgttcaatactctccggaccagtttaaaagttccaacattgcgaagaaagaactcagaaaagaattgatggatctgggctttaaagtccgctatataagcgaaaattacaagatgatggcgatcgaaggtactgccactcttcaagcagtacaccctaaccaaaactggcattataatatgattaaagctccggaagcgtgggctattacgtctggatcctctagcgttaaagtagcagtcctggatacagggatcgaccataatcacccatccttggccaacttcgtgaatactaatcttggccggtcgtttgttggaggaaacaccatggatgtgcaaggtcatggcacacatgttgctggcacgattgcatcttatgggagtgtaagcggagtgatgcagagtgcgacactgatcccggtcaaagtgctcgataattctggcagcgggtccctttacggtattacgcaaggcatattgtatgccgccgacatcgatgcggacgtcattaacatgtctctgggtggaagtggctataatcagagcatggatgaggctgttcaaacagcagttgctcagggaaccattgtagtagcagcgactggcaatgatggtgcatcgtcgatcagttatcctgctgcctacagcagcgtcattgcggtgggatctgtgacgtccaatcgtacacgatcctcgttttctaactatggatctgggcttgaagttatggcaccgggcagcaacatctacagtacgtatcctaatggcagatatacatctttgagtggtacaagcatggctactccgcacgttgcgggcgtagctgggctcattcgcgcagccaacccagacatatctgtcgcgcaagcccgtcagattctgcgggataccgcgcaagaagcaggatcgttcacacaatacggctatggaatcgtcgatgctcatgccgccgttgttgctgcatccggtggtagcggcggc

SEQ ID NO: 942 - protein, 413 aa, synthetic construct
  REGION 1..413: note = Variant of serine peptidase from Bacillus sinesaloumensis
MADQASQANGNQDVIEGELIVSVEPKNGKPDVSIQSAQSVTGQEDVLKSKGFTIVDTLHVEDSSVKPLVSKNFNKKVVEKMGLVYLVQYSPDQFKSSNIAKKELRKELMDLGFKVRYISENYKMMAIEGTATLQAVHPNQNWHYNMIKAPEAWAITSGSSSVKVAVLDTGIDHNHPSLANFVNTNLGRSFVGGNTMDVQGHGTHVAGTIASYGSVSGVMQSATLIPVKVLDNSGSGSLYGITQGILYAADIDADVINMSLGGSGYNQSMDEAVQTAVAQGTIVVAATGNDGASSISYPAAYSSVIAVGSVTSNRTRSSFSNYGSGLEVMAPGSNIYSTYPNGRYTSLSGTSMATPHVAGVAGLIRAANPDISVAQARQILRDTAQEAGSFTQYGYGIVDAHAAVVAASGGSGG

SEQ ID NO: 943 - DNA, 1239 bp, synthetic construct
  misc_feature 1..1239: note = Variant of serine peptidase from Bacillus sinesaloumensis
  source 1..1239: mol_type = other DNA
atggcagatcaagctagtcaagctaatggaaaccaggacgtcattgaaggcgagctgatcgtttcagtggaaccgaagaacggtaaacctgatgtgagcattcaaagtgcacaatccgtaacagggcaggaagacgtccttaaatcgaaaggctttacgatcgttgataccttgcatgtagaggatagcagcgtcaagccactcgtctcgaagaatttcaataagaaagtggtggagaagatgggactggtgtatcttgttcaatactctccggaccagtttaaaagttccaacattgcgaagaaagaactcagaaaagaattgatggatctgggctttaaagtccgctatataagcgaaaattacaagatgatggcgatcgaaggtacagccactcttcaggcagtacaccctaaccaaaattggcattatgaaatgattaaagctccggaagcgtgggctattacgtctggatcctctagcgttaaagtagcagtcctggatacagggatcgaccataatcacccatccttggccaacttcgtgaatactaatcttggccggtcgtttgttggaggaaacaccatggatgtgcaaggtcatggcacacatgttgctggcacgattgcatcttatgggagtgtaagcggagtgatgcagagtgcgacactgatcccggtcaaagtgctcgataattctggcagcgggtccctttacggtattacgcaaggcatattgtatgccgccgacatcgatgcggacgtcattaacatgtctctgggtggaagtggctataatcagagcatggatgaggctgttcaaacagcagttgctctgggaaccattgtagtagcagcgactggcaatgatggtgcatcgtcgatcagttatcctgctgcctacagcagcgtcattgcggtgggatctgtgacgattaatcgtacacgatcctcgttttctaactatggatctgggcttgaagttatggcaccgggcagcaacatctacagtacgtatcctaatggcagatatacatctttgagtggtacaagcatggctactccgcacgttgcgggcgtagctgggctcattcgcgcagccaacccagacatatctgtcgcgcaagcccgtcagattctgcgggataccgcgcaagaagcaggatcgttcacatactacggctatggaatcgtcgatgctcatgccgccgttgttgctgcatccggtggtagcggcggc

SEQ ID NO: 944 - protein, 413 aa, synthetic construct
  REGION 1..413: note = Variant of serine peptidase from Bacillus sinesaloumensis
MADQASQANGNQDVIEGELIVSVEPKNGKPDVSIQSAQSVTGQEDVLKSKGFTIVDTLHVEDSSVKPLVSKNFNKKVVEKMGLVYLVQYSPDQFKSSNIAKKELRKELMDLGFKVRYISENYKMMAIEGTATLQAVHPNQNWHYEMIKAPEAWAITSGSSSVKVAVLDTGIDHNHPSLANFVNTNLGRSFVGGNTMDVQGHGTHVAGTIASYGSVSGVMQSATLIPVKVLDNSGSGSLYGITQGILYAADIDADVINMSLGGSGYNQSMDEAVQTAVALGTIVVAATGNDGASSISYPAAYSSVIAVGSVTINRTRSSFSNYGSGLEVMAPGSNIYSTYPNGRYTSLSGTSMATPHVAGVAGLIRAANPDISVAQARQILRDTAQEAGSFTYYGYGIVDAHAAVVAASGGSGG

SEQ ID NO: 945 - DNA, 1239 bp, synthetic construct
  misc_feature 1..1239: note = Variant of serine peptidase from Bacillus sinesaloumensis
  source 1..1239: mol_type = other DNA
atggcagatcaagctagtcaagctaatggaaaccaggacgtcattgaaggcgagctgatcgtttcagtggaaccgaagaacggtaaacctgatgtgagcattcaaagtgcacaatccgtaacagggcaggaagacgtccttaaatcgaaaggctttacgatcgttgataccttgcatgtagaggatagcagcgtcaagccactcgtctcgaagaatttcaataagaaagtggtggagaagatgggactggtgtatcttgttcaatactctccggaccagtttaaaagttccaacattgcgaagaaagaactcagaaaagaattgatggatctgggctttaaagtccgctatataagcgaaaattacaagatgatggcgatcacgggtactgccactcttcaagcagtacaccctaaccaaaactggcattatgaaatgattaaagctccggaagcgtgggctattacgtctggatcctctagcgttaaagtagcagtcctggatacagggatcgaccataatcacccatccttggccaacttcgtgaatactaatcttggccggtcgtttgttggaggaaacaccatggatgggcaaggtcatggcacacatgttgctggcacgattgcatcttatgggagtgtaagcggagtgatgcagagtgcgacactgatcccggtcaaagtgctcgataattctggcagcgggtccctttacggtattacgcaaggcatattgtatgccgccgacatcgatgcggacgtcattaacatgtctctgggtggaggtggctataatcagagcatggatgaggctgttcaaacagcagttgctcagggaaccattgtagtagcagcgactggcaatgatggtgcatcgtcgatcagttatcctgctgcctacagcagcgtcattgcggtgggatctgtgacgattcaacgtacacgatcctcgttttctaactatggatctgggcttgaagttatggcaccgggcagcaacatctacagtacgtatcctaattccagatatacatctttgagtggtacaagcatggctactccgcacgttgcgggcgtagctgggctcattcgcgcagccaacccagacatatctgtcgcgcaagcccgtcagattctgcgggataccgcgcaagaagcaggatcgttcacatactacggctatggaatcgtcgatgctcatgccgccgttgttgctgcatccggtggtagcggcggc

SEQ ID NO: 946 - protein, 413 aa, synthetic construct
  REGION 1..413: note = Variant of serine peptidase from Bacillus sinesaloumensis
MADQASQANGNQDVIEGELIVSVEPKNGKPDVSIQSAQSVTGQEDVLKSKGFTIVDTLHVEDSSVKPLVSKNFNKKVVEKMGLVYLVQYSPDQFKSSNIAKKELRKELMDLGFKVRYISENYKMMAITGTATLQAVHPNQNWHYEMIKAPEAWAITSGSSSVKVAVLDTGIDHNHPSLANFVNTNLGRSFVGGNTMDGQGHGTHVAGTIASYGSVSGVMQSATLIPVKVLDNSGSGSLYGITQGILYAADIDADVINMSLGGGGYNQSMDEAVQTAVAQGTIVVAATGNDGASSISYPAAYSSVIAVGSVTIQRTRSSFSNYGSGLEVMAPGSNIYSTYPNSRYTSLSGTSMATPHVAGVAGLIRAANPDISVAQARQILRDTAQEAGSFTYYGYGIVDAHAAVVAASGGSGG

SEQ ID NO: 947 - DNA, 1239 bp, synthetic construct; identical to SEQ ID NO: 915
  misc_feature 1..1239: note = Variant of serine peptidase from Bacillus sinesaloumensis
  source 1..1239: mol_type = other DNA

SEQ ID NO: 948 - protein, 413 aa, synthetic construct; identical to SEQ ID NO: 916
  REGION 1..413: note = Variant of serine peptidase from Bacillus sinesaloumensis

SEQ ID NO: 949 - DNA, 1239 bp, synthetic construct
  misc_feature 1..1239: note = Variant of serine peptidase from Bacillus sinesaloumensis
  source 1..1239: mol_type = other DNA
atggcagatcaagctagtcaagctaatggaaaccaggacgtcattgaaggcgagctgatcgtttcagtggaaccgaagaacggtaaacctgatgtgagcattcaaagtgcacaatccgtaacagggcaggaagacgtccttaaatcgaaaggctttacgatcgttgataccttgcatgtagaggatagcagcgtcaagccactcgtctcgaagaatttcaataagaaagtggtggagaagatgggactggtgtatcttgttcaatactctccggaccagtttaaaagttccaacattgcgaagaaagaactcagaaaagaattgatggatctgggctttaaagtccgctatataagcgaaaattacaagatgatggcgatcgaaggtacagccactcttcagggggtgcaccctaaccaagtttggcattataatatgattaaagctccggaagcgtgggctattacgtctggatccctgagcgttaaagtagcagtcctggatacagggatcgaccataatcacccatccttggccaacttcgtgaatactaatcttggccgctcgtttgttggaggaaacaccatggatgttcaaggtcatggcacacatgttgctggcacgattgcatcttatgggagtgtaagcggagtgatgcagagtgcgacactgatcccggtcaaagtgctcgataattctggcagcgggtccctttacggtattacgcaaggcatattgtatgccgccgacatcgatgcggacgtcattaacatgtctctgggtggaggaggctataatcagagcatggatgaggctgttcaaacagcagttgctcagggaaccattgtagtagcagcgactggcaatgatggtgcatcgtcgatcagttatcctgctgcctacagcagcgtcattgcggtgggatctgtggactccaatcgtgttcgatcctcgttttctaactatggatctgggcttgaagttatggcaccgggcagcaacatctacagtacgtatcctaattccagatatacatctttgagtggtacaagcatggctactccgcacgttgcgggcgtagctgggctcattcgcgcagccaacccagacatagtggtcgcgcaagcccgtcagattctgcgggataccgcgcaagaagcaggatcgttcacacagtacggctatggaatcgtcgatgctcatgccgccgttgttgctgcatccggtggtgtgggcggc

SEQ ID NO: 950 - protein, 413 aa, synthetic construct
  REGION 1..413: note = Variant of serine peptidase from Bacillus sinesaloumensis
MADQASQANGNQDVIEGELIVSVEPKNGKPDVSIQSAQSVTGQEDVLKSKGFTIVDTLHVEDSSVKPLVSKNFNKKVVEKMGLVYLVQYSPDQFKSSNIAKKELRKELMDLGFKVRYISENYKMMAIEGTATLQGVHPNQVWHYNMIKAPEAWAITSGSLSVKVAVLDTGIDHNHPSLANFVNTNLGRSFVGGNTMDVQGHGTHVAGTIASYGSVSGVMQSATLIPVKVLDNSGSGSLYGITQGILYAADIDADVINMSLGGGGYNQSMDEAVQTAVAQGTIVVAATGNDGASSISYPAAYSSVIAVGSVDSNRVRSSFSNYGSGLEVMAPGSNIYSTYPNSRYTSLSGTSMATPHVAGVAGLIRAANPDIVVAQARQILRDTAQEAGSFTQYGYGIVDAHAAVVAASGGVGG

SEQ ID NO: 951 - DNA, 1239 bp, synthetic construct
  misc_feature 1..1239: note = Variant of serine peptidase from Bacillus sinesaloumensis
  source 1..1239: mol_type = other DNA
atggcagatcaagctagtcaagctaatggaaaccaggacgtcattgaaggcgagctgatcgtttcagtggaaccgaagaacggtaaacctgatgtgagcattcaaagtgcacaatccgtaacagggcaggaagacgtccttaaatcgaaaggctttacgatcgttgataccttgcatgtagaggatagcagcgtcaagccactcgtctcgaagaatttcaataagaaagtggtggagaagatgggactggtgtatcttgttcaatactctccggaccagtttaaaagttccaacattgcgaagaaagaactcagaaaagaattgatggatctgggctttaaagtccgctatataagcgaaaattacaagatgatggcgatcgaaggtacagccactcttcagggggtgcaccctaaccaagtttggcattataatatgattaaagctccggaagcgtgggctattacgtctggatccctgagcgttaaagtagcagtcctggatacagggatcgaccataatcacccatccttggccaacttcgtgaatactaatcttggccgctcgtttgttggaggaaacaccatggatgttcaaggtcatggcacacatgttgctggcacgattgcatcttatgggagtgtaagcggagtgatgcagagtgcgacactgatcccggtcaaagtgctcgataattctggcagcgggtccctttacggtattacgcaaggcatattgtatgccgccgacatcgatgcggacgtcattaacatgtctctgggtggaggaggctataatcagagcatggatgaggctgttcaaacagcagttgctcagggaaccattgtagtagcagcgactggcaatgatggtgcatcgtcgatcagttatcctgctgcctacagcagcgtcattgcggtgggatctgtggactccaatcgtgttcgatcctcgttttctaactatggatctgggcttgaagttatggcaccgggcagcaacatctacagtacgtatcctaattccagatatacatctttgagtggtacaagcatggctactccgcacgttgcgggcgtagctgggctcattcgcgcagccaacccagacatagtggtcgcgcaagcccgtcagattctgcgggataccgcgcaagaagcaggatcgttcacacagtacggctatggaatcgtcgatgctcatgccgccgttgttgctgcatccggtggtcggggcggc

SEQ ID NO: 952 - protein, 413 aa, synthetic construct
  REGION 1..413: note = Variant of serine peptidase from Bacillus sinesaloumensis
MADQASQANGNQDVIEGELIVSVEPKNGKPDVSIQSAQSVTGQEDVLKSKGFTIVDTLHVEDSSVKPLVSKNFNKKVVEKMGLVYLVQYSPDQFKSSNIAKKELRKELMDLGFKVRYISENYKMMAIEGTATLQGVHPNQVWHYNMIKAPEAWAITSGSLSVKVAVLDTGIDHNHPSLANFVNTNLGRSFVGGNTMDVQGHGTHVAGTIASYGSVSGVMQSATLIPVKVLDNSGSGSLYGITQGILYAADIDADVINMSLGGGGYNQSMDEAVQTAVAQGTIVVAATGNDGASSISYPAAYSSVIAVGSVDSNRVRSSFSNYGSGLEVMAPGSNIYSTYPNSRYTSLSGTSMATPHVAGVAGLIRAANPDIVVAQARQILRDTAQEAGSFTQYGYGIVDAHAAVVAASGGRGG

SEQ ID NO: 953 - DNA, 1239 bp, synthetic construct
  misc_feature 1..1239: note = Variant of serine peptidase from Bacillus sinesaloumensis
  source 1..1239: mol_type = other DNA
atggcagatcaagctagtcaagctaatggaaaccaggacgtcattgaaggcgagctgatcgtttcagtggaaccgaagaacggtaaacctgatgtgagcattcaaagtgcacaatccgtaacagggcaggaagacgtccttaaatcgaaaggctttacgatcgttgataccttgcatgtagaggatagcagcgtcaagccactcgtctcgaagaatttcaataagaaagtggtggagaagatgggactggtgtatcttgttcaatactctccggaccagtttaaaagttccaacattgcgaagaaagaactcagaaaagaattgatggatctgggctttaaagtccgctatataagcgaaaattacaagatgatggcgatcgaaggtacagccactcttcagggggtgcaccctaaccaagtttggcattataatatgattaaagctccggaagcgtgggctattacgtctggatccctgagcgttaaagtagcagtcctggatacagggatcgaccataatcacccatccttggccaacttcgtgaatactaatcttggccgctcgtttgttggaggaaacaccatggatgttcaaggtcatggcacacatgttgctggcacgattgcatcttatgggagtgtaagcggagtgatgcagagtgcgacactgatcccggtcaaagtgctcgataattctggcagcgggtccctttacggtattacgcaaggcatattgtatgccgccgacatcgatgcggacgtcattaacatgtctctgggtggaggaggctataatcagagcatggatgaggctgttcaaacagcagttgctcagggaaccattgtagtagcagcgactggcaatgatggtgcatcgtcgatcagttatcctgctgcctacagcagcgtcattgcggtgggatctgtggactccaatcgtgttcgatcctcgttttctaactatggatctgggcttgaagttatggcaccgggcagcaacatctacagtacgtatcctaattccagatatacatctttgagtggtacaagcatggctactccgcacgttgcgggcgtagctgggctcattcgcgcagccaacccagacatagtggtcgcgcaagcccgtcagattctgcgggataccgcgcaagaagcaggatcgttcacacagtacggctatggaatcgtcgatgctcatggggccgttgttgctgcatccggtggtagcggcggc

SEQ ID NO: 954 - protein, 413 aa, synthetic construct
  REGION 1..413: note = Variant of serine peptidase from Bacillus sinesaloumensis
MADQASQANGNQDVIEGELIVSVEPKNGKPDVSIQSAQSVTGQEDVLKSKGFTIVDTLHVEDSSVKPLVSKNFNKKVVEKMGLVYLVQYSPDQFKSSNIAKKELRKELMDLGFKVRYISENYKMMAIEGTATLQGVHPNQVWHYNMIKAPEAWAITSGSLSVKVAVLDTGIDHNHPSLANFVNTNLGRSFVGGNTMDVQGHGTHVAGTIASYGSVSGVMQSATLIPVKVLDNSGSGSLYGITQGILYAADIDADVINMSLGGGGYNQSMDEAVQTAVAQGTIVVAATGNDGASSISYPAAYSSVIAVGSVDSNRVRSSFSNYGSGLEVMAPGSNIYSTYPNSRYTSLSGTSMATPHVAGVAGLIRAANPDIVVAQARQILRDTAQEAGSFTQYGYGIVDAHGAVVAASGGSGG

SEQ ID NO: 955 - DNA, 1239 bp, synthetic construct
  misc_feature 1..1239: note = Variant of serine peptidase from Bacillus sinesaloumensis
  source 1..1239: mol_type = other DNA
atggcagatcaagctagtcaagctaatggaaaccaggacgtcattgaaggcgagctgatcgtttcagtggaaccgaagaacggtaaacctgatgtgagcattcaaagtgcacaatccgtaacagggcaggaagacgtccttaaatcgaaaggctttacgatcgttgataccttgcatgtagaggatagcagcgtcaagccactcgtctcgaagaatttcaataagaaagtggtggagaagatgggactggtgtatcttgttcaatactctccggaccagtttaaaagttccaacattgcgaagaaagaactcagaaaagaattgatggatctgggctttaaagtccgctatataagcgaaaattacaagatgatggcgatcgaaggtacagccactcttcagggggtgcaccctaaccaagtttggcattataatatgattaaagctccggaagcgtgggctattacgtctggatccctgagcgttaaagtagcagtcctggatacagggatcgaccataatcacccatccttggccaacttcgtgaatactaatcttggccgctcgtttgttggaggaaacaccatggatgttcaaggtcatggcacacatgttgctggcacgattgcatcttatgggagtgtaagcggagtgatgcagagtgcgacactgatcccggtcaaagtgctcgataattctggcagcgggtccctttacggtattacgcaaggcatattgtatgccgccgacatcgatgcggacgtcattaacatgtctctgggtggaggaggctataatcagagcatggatgaggctgttcaaacagcagttgctcagggaaccattgtagtatcggcgactggcaatgatggtgcatcgtcgatcagttatcctgctgcctacagcagcgtcattgcggtgggatctgtggactccaatcgtgttcgatcctcgttttctaactatggatctgggcttgaagttatggcaccgggcagcaacatctacagtacgtatcctaattccagatatacatctttgagtggtacaagcatggctactccgcacgttgcgggcgtagctgggctcattcgcgcagccaacccagacatagtggtcgcgcaagcccgtcagattctgcgggataccgcgcaagaagcaggatcgttcacacagtacggctatggaatcgtcgatgctcatgccgccgttgttgctgcatccggtggtagcggcggc

SEQ ID NO: 956 - protein, 413 aa, synthetic construct
  REGION 1..413: note = Variant of serine peptidase from Bacillus sinesaloumensis
MADQASQANGNQDVIEGELIVSVEPKNGKPDVSIQSAQSVTGQEDVLKSKGFTIVDTLHVEDSSVKPLVSKNFNKKVVEKMGLVYLVQYSPDQFKSSNIAKKELRKELMDLGFKVRYISENYKMMAIEGTATLQGVHPNQVWHYNMIKAPEAWAITSGSLSVKVAVLDTGIDHNHPSLANFVNTNLGRSFVGGNTMDVQGHGTHVAGTIASYGSVSGVMQSATLIPVKVLDNSGSGSLYGITQGILYAADIDADVINMSLGGGGYNQSMDEAVQTAVAQGTIVVSATGNDGASSISYPAAYSSVIAVGSVDSNRVRSSFSNYGSGLEVMAPGSNIYSTYPNSRYTSLSGTSMATPHVAGVAGLIRAANPDIVVAQARQILRDTAQEAGSFTQYGYGIVDAHAAVVAASGGSGG

SEQ ID NO: 957 - DNA, 1239 bp, synthetic construct
  misc_feature 1..1239: note = Variant of serine peptidase from Bacillus sinesaloumensis
  source 1..1239: mol_type = other DNA
atggcagatcaagctagtcaagctaatggaaaccaggacgtcattgaaggcgagctgatcgtttcagtggaaccgaagaacggtaaacctgatgtgagcattcaaagtgcacaatccgtaacagggcaggaagacgtccttaaatcgaaaggctttacgatcgttgataccttgcatgtagaggatagcagcgtcaagccactcgtctcgaagaatttcaataagaaagtggtggagaagatgggactggtgtatcttgttcaatactctccggaccagtttaaaagttccaacattgcgaagaaagaactcagaaaagaattgatggatctgggctttaaagtccgctatataagcgaaaattacaagatgatggcgatcgaaggtacagccactcttcagggggtgcaccctaaccaagtttggcattataatatgattaaagctccggaagcgtgggctattacgtctggatccctgagcgttaaagtagcagtcctggatacagggatcgaccataatcacccatccttggccaacttcgtgaatactaatcttggccgctcgtttgttggaggaaacaccatggatgttcaaggtcatggcacacatgttgctggcacgattgcatcttatgggagtgtaagcggagtgatgcagagtgcgacactgatcccggtcaaagtgctcgataattctggcagcgggtccctttacggtattacgcaaggcgtgttgtatgccgccgacatcgatgcggacgtcattaacatgtctctgggtggaggaggctataatcagagcatggatgaggctgttcaaacagcagttgctcagggaaccattgtagtagcagcgactggcaatgatggtgcatcgtcgatcagttatcctgctgcctacagcagcgtcattgcggtgggatctgtggactccaatcgtgttcgatcctcgttttctaactatggatctgggcttgaagttatggcaccgggcagcaacatctacagtacgtatcctaattccagatatacatctttgagtggtacaagcatggctactccgcacgttgcgggcgtagctgggctcattcgcgcagccaacccagacatagtggtcgcgcaagcccgtcagattctgcgggataccgcgcaagaagcaggatcgttcacacagtacggctatggaatcgtcgatgctcatgccgccgttgttgctgcatccggtggtagcggcggc

SEQ ID NO: 958 - protein, 413 aa, synthetic construct
  REGION 1..413: note = Variant of serine peptidase from Bacillus sinesaloumensis
MADQASQANGNQDVIEGELIVSVEPKNGKPDVSIQSAQSVTGQEDVLKSKGFTIVDTLHVEDSSVKPLVSKNFNKKVVEKMGLVYLVQYSPDQFKSSNIAKKELRKELMDLGFKVRYISENYKMMAIEGTATLQGVHPNQVWHYNMIKAPEAWAITSGSLSVKVAVLDTGIDHNHPSLANFVNTNLGRSFVGGNTMDVQGHGTHVAGTIASYGSVSGVMQSATLIPVKVLDNSGSGSLYGITQGVLYAADIDADVINMSLGGGGYNQSMDEAVQTAVAQGTIVVAATGNDGASSISYPAAYSSVIAVGSVDSNRVRSSFSNYGSGLEVMAPGSNIYSTYPNSRYTSLSGTSMATPHVAGVAGLIRAANPDIVVAQARQILRDTAQEAGSFTQYGYGIVDAHAAVVAASGGSGG

SEQ ID NO: 959 - DNA, 1239 bp, synthetic construct
  misc_feature 1..1239: note = Variant of serine peptidase from Bacillus sinesaloumensis
  source 1..1239: mol_type = other DNA
atggcagatcaagctagtcaagctaatggaaaccaggacgtcattgaaggcgagctgatcgtttcagtggaaccgaagaacggtaaacctgatgtgagcattcaaagtgcacaatccgtaacagggcaggaagacgtccttaaatcgaaaggctttacgatcgttgataccttgcatgtagaggatagcagcgtcaagccactcgtctcgaagaatttcaataagaaagtggtggagaagatgggactggtgtatcttgttcaatactctccggaccagtttaaaagttccaacattgcgaagaaagaactcagaaaagaattgatggatctgggctttaaagtccgctatataagcgaaaattacaagatgatggcgatcgaaggtacagccactcttcagggggtgcaccctaaccaagtttggcattataatatgattaaagctccggaagcgtgggctattacgtctggatccctgagcgttaaagtagcagtcctggatacagggatcgaccataatcacccatccttggccaacttcgtgaatactaatcttggccgctcgtttgttggaggaaacaccatggatgttcaaggtcatggcacacatgttgctggcacgattgcatcttatgggagtgtaagcggagtgatgcagagtgcgacactgatcccggtcaaagtgctcgataattctggcagcgggtccctttacggtattacgcaaggcatattgtatgccgccgacatcgatgcggacgtcattaacatgtctctgggtggaggaggctatcatcagagcatggatgaggctgttcaaacagcagttgctcagggaaccattgtagtagcagcgactggcaatgatggtgcatcgtcgatcagttatcctgctgcctacagcagcgtcattgcggtgggatctgtggactccaatcgtgttcgatcctcgttttctaactatggatctgggcttgaagttatggcaccgggcagcaacatctacagtacgtatcctaattccagatatacatctttgagtggtacaagcatggctactccgcacgttgcgggcgtagctgggctcattcgcgcagccaacccagacatagtggtcgcgcaagcccgtcagattctgcgggataccgcgcaagaagcaggatcgttcacacagtacggctatggaatcgtcgatgctcatgccgccgttgttgctgcatccggtggtagcggcggc

SEQ ID NO: 960 - protein, 413 aa, synthetic construct
  REGION 1..413: note = Variant of serine peptidase from Bacillus sinesaloumensis
MADQASQANGNQDVIEGELIVSVEPKNGKPDVSIQSAQSVTGQEDVLKSKGFTIVDTLHVEDSSVKPLVSKNFNKKVVEKMGLVYLVQYSPDQFKSSNIAKKELRKELMDLGFKVRYISENYKMMAIEGTATLQGVHPNQVWHYNMIKAPEAWAITSGSLSVKVAVLDTGIDHNHPSLANFVNTNLGRSFVGGNTMDVQGHGTHVAGTIASYGSVSGVMQSATLIPVKVLDNSGSGSLYGITQGILYAADIDADVINMSLGGGGYHQSMDEAVQTAVAQGTIVVAATGNDGASSISYPAAYSSVIAVGSVDSNRVRSSFSNYGSGLEVMAPGSNIYSTYPNSRYTSLSGTSMATPHVAGVAGLIRAANPDIVVAQARQILRDTAQEAGSFTQYGYGIVDAHAAVVAASGGSGG

SEQ ID NO: 961 - DNA, 1239 bp, synthetic construct
  misc_feature 1..1239: note = Variant of serine peptidase from Bacillus sinesaloumensis
  source 1..1239: mol_type = other DNA
atggcagatcaagctagtcaagctaatggaaaccaggacgtcattgaaggcgagctgatcgtttcagtggaaccgaagaacggtaaacctgatgtgagcattcaaagtgcacaatccgtaacagggcaggaagacgtccttaaatcgaaaggctttacgatcgttgataccttgcatgtagaggatagcagcgtcaagccactcgtctcgaagaatttcaataagaaagtggtggagaagatgggactggtgtatcttgttcaatactctccggaccagtttaaaagttccaacattgcgaagaaagaactcagaaaagaattgatggatctgggctttaaagtccgctatataagcgaaaattacaagatgatggcgatcgaaggtacagccactcttcagggggtgcaccctaaccaagtttggcattataatatgattaaagctccggaagcgtgggctattacgtctggatccctgagcgttaaagtagcagtcctggatacagggatcgaccataatcacccatccttggccaacttcgtgaatactaatcttggccgctcgtttgttggaggaaacaccatggatgttcaaggtcatggcacacatgttgctggcacgattgcatcttatgggagtgtaagcggagtgatgcagagtgcgacactgatcccggtcaaagtgctcgataattctggcagcgggtccctttacggtattacgcaaggcatattgtatgccgccgacatcgatgcggacgtcattaacatgtctctgggtggaggaggctataatcagagcatggatgaggctgttcaaacagcagttgctcagggaaccattgtagtagcagcgactggcaatgatggtgcatcgtcgatcagttatcctgctgcctacagcagcgtcattgcggtgggatctgtggactccaatcgtgttcgatcctcgttttctaactatggatctgggcttgaagttatggcaccgggcagcaacatctacagtacgtatcctaattccagatatacatctttgagtggtacaagcatggctactgctcacgttgcgggcgtagctgggctcattcgcgcagccaacccagacatagtggtcgcgcaagcccgtcagattctgcgggataccgcgcaagaagcaggatcgttcacacagtacggctatggaatcgtcgatgctcatgccgccgttgttgctgcatccggtggtagcggcggc

SEQ ID NO: 962 - protein, 413 aa, synthetic construct
  REGION 1..413: note = Variant of serine peptidase from Bacillus sinesaloumensis
MADQASQANGNQDVIEGELIVSVEPKNGKPDVSIQSAQSVTGQEDVLKSKGFTIVDTLHVEDSSVKPLVSKNFNKKVVEKMGLVYLVQYSPDQFKSSNIAKKELRKELMDLGFKVRYISENYKMMAIEGTATLQGVHPNQVWHYNMIKAPEAWAITSGSLSVKVAVLDTGIDHNHPSLANFVNTNLGRSFVGGNTMDVQGHGTHVAGTIASYGSVSGVMQSATLIPVKVLDNSGSGSLYGITQGILYAADIDADVINMSLGGGGYNQSMDEAVQTAVAQGTIVVAATGNDGASSISYPAAYSSVIAVGSVDSNRVRSSFSNYGSGLEVMAPGSNIYSTYPNSRYTSLSGTSMATAHVAGVAGLIRAANPDIVVAQARQILRDTAQEAGSFTQYGYGIVDAHAAVVAASGGSGG

SEQ ID NO: 963 - DNA, 1239 bp, synthetic construct
  misc_feature 1..1239: note = Variant of serine peptidase from Bacillus sinesaloumensis
  source 1..1239: mol_type = other DNA
atggcagatcaagctagtcaagctaatggaaaccaggacgtcattgaaggcgagctgatcgtttcagtggaaccgaagaacggtaaacctgatgtgagcattcaaagtgcacaatccgtaacagggcaggaagacgtccttaaatcgaaaggctttacgatcgttgataccttgcatgtagaggatagcagcgtcaagccactcgtctcgaagaatttcaataagaaagtggtggagaagatgggactggtgtatcttgttcaatactctccggaccagtttaaaagttccaacattgcgaagaaagaactcagaaaagaattgatggatctgggctttaaagtccgctatataagcgaaaattacaagatgatggcgatcgaaggtacagccactcttcagggggtgcaccctaaccaagtttggcattataatatgattaaagctccggaagcgtgggctattacgtctggatccctgagcgttaaagtagcagtcctggatacagggatcgaccataatcacccatccttggccaacttcgtgaatactaatcttggccgctcgtttgttggaggaaacaccatggatgttcaaggtcatggcacacatgttgctggcacgattgcatcttatgggagtgtaagcggagtgatgcagagtgcgacactgatcccggtcaaagtgctcgataattctggcagcgggtccctttacggtattacgcaaggcatattgtatgccgccgacatcgatgcggacgtcattaactggtctctgggtggaggaggctataatcagagcatggatgaggctgttcaaacagcagttgctcagggaaccattgtagtagcagcgactggcaatgatggtgcatcgtcgatcagttatcctgctgcctacagcagcgtcattgcggtgggatctgtggactccaatcgtgttcgatcctcgttttctaactatggatctgggcttgaagttatggcaccgggcagcaacatctacagtacgtatcctaattccagatatacatctttgagtggtacaagcatggctactccgcacgttgcgggcgtagctgggctcattcgcgcagccaacccagacatagtggtcgcgcaagcccgtcagattctgcgggataccgcgcaagaagcaggatcgttcacacagtacggctatggaatcgtcgatgctcatgccgccgttgttgctgcatccggtggtagcggcggc

SEQ ID NO: 964 - protein, 413 aa, synthetic construct
  REGION 1..413: note = Variant of serine peptidase from Bacillus sinesaloumensis
MADQASQANGNQDVIEGELIVSVEPKNGKPDVSIQSAQSVTGQEDVLKSKGFTIVDTLHVEDSSVKPLVSKNFNKKVVEKMGLVYLVQYSPDQFKSSNIAKKELRKELMDLGFKVRYISENYKMMAIEGTATLQGVHPNQVWHYNMIKAPEAWAITSGSLSVKVAVLDTGIDHNHPSLANFVNTNLGRSFVGGNTMDVQGHGTHVAGTIASYGSVSGVMQSATLIPVKVLDNSGSGSLYGITQGILYAADIDADVINWSLGGGGYNQSMDEAVQTAVAQGTIVVAATGNDGASSISYPAAYSSVIAVGSVDSNRVRSSFSNYGSGLEVMAPGSNIYSTYPNSRYTSLSGTSMATPHVAGVAGLIRAANPDIVVAQARQILRDTAQEAGSFTQYGYGIVDAHAAVVAASGGSGG

SEQ ID NO: 965 - DNA, 1239 bp, synthetic construct
  misc_feature 1..1239: note = Variant of serine peptidase from Bacillus sinesaloumensis
  source 1..1239: mol_type = other DNA
atggcagatcaagctagtcaagctaatggaaaccaggacgtcattgaaggcgagctgatcgtttcagtggaaccgaagaacggtaaacctgatgtgagcattcaaagtgcacaatccgtaacagggcaggaagacgtccttaaatcgaaaggctttacgatcgttgataccttgcatgtagaggatagcagcgtcaagccactcgtctcgaagaatttcaataagaaagtggtggagaagatgggactggtgtatcttgttcaatactctccggaccagtttaaaagttccaacattgcgaagaaagaactcagaaaagaattgatggatctgggctttaaagtccgctatataagcgaaaattacaagatgatggcgatcgaaggtacagccactcttcagggggtgcaccctaaccaagtttggcattataatatgattaaagctccggaagcgtgggctattacgtctggatccctgagcgttaaagtagcagtcctggatacagggatcgaccataatcacccatccttggccaacttcgtgaatactaatcttggccgctcgtttgttggaggaaacaccatggatgttcaaggtcatggcacacatgttgctggcacgattgcatcttatgggagtgtaagcggagtgatgcagagtggtacactgatcccggtcaaagtgctcgataattctggcagcgggtccctttacggtattacgcaaggcatattgtatgccgccgacatcgatgcggacgtcattaacatgtctctgggtggaggaggctataatcagagcatggatgaggctgttcaaacagcagttgctcagggaaccattgtagtagcagcgactggcaatgatggtgcatcgtcgatcagttatcctgctgcctacagcagcgtcattgcggtgggatctgtggactccaatcgtgttcgatcctcgttttctaactatggatctgggcttgaagttatggcaccgggcagcaacatctacagtacgtatcctaattccagatatacatctttgagtggtacaagcatggctactccgcacgttgcgggcgtagctgggctcattcgcgcagccaacccagacatagtggtcgcgcaagcccgtcagattctgcgggataccgcgcaagaagcaggatcgttcacacagtacggctatggaatcgtcgatgctcatgccgccgttgttgctgcatccggtggtagcggcggc

SEQ ID NO: 966 - protein, 413 aa, synthetic construct
  REGION 1..413: note = Variant of serine peptidase from Bacillus sinesaloumensis
MADQASQANGNQDVIEGELIVSVEPKNGKPDVSIQSAQSVTGQEDVLKSKGFTIVDTLHVEDSSVKPLVSKNFNKKVVEKMGLVYLVQYSPDQFKSSNIAKKELRKELMDLGFKVRYISENYKMMAIEGTATLQGVHPNQVWHYNMIKAPEAWAITSGSLSVKVAVLDTGIDHNHPSLANFVNTNLGRSFVGGNTMDVQGHGTHVAGTIASYGSVSGVMQSGTLIPVKVLDNSGSGSLYGITQGILYAADIDADVINMSLGGGGYNQSMDEAVQTAVAQGTIVVAATGNDGASSISYPAAYSSVIAVGSVDSNRVRSSFSNYGSGLEVMAPGSNIYSTYPNSRYTSLSGTSMATPHVAGVAGLIRAANPDIVVAQARQILRDTAQEAGSFTQYGYGIVDAHAAVVAASGGSGG

SEQ ID NO: 967 - DNA, 1239 bp, synthetic construct
  misc_feature 1..1239: note = Variant of serine peptidase from Bacillus sinesaloumensis
  source 1..1239: mol_type = other DNA
atggcagatcaagctagtcaagctaatggaaaccaggacgtcattgaaggcgagctgatcgtttcagtggaaccgaagaacggtaaacctgatgtgagcattcaaagtgcacaatccgtaacagggcaggaagacgtccttaaatcgaaaggctttacgatcgttgataccttgcatgtagaggatagcagcgtcaagccactcgtctcgaagaatttcaataagaaagtggtggagaagatgggactggtgtatcttgttcaatactctccggaccagtttaaaagttccaacattgcgaagaaagaactcagaaaagaattgatggatctgggctttaaagtccgctatataagcgaaaattacaagatgatggcgatcgaaggtacagccactcttcagggggtgcaccctaacctggtttggcattataatatgattaaagctccggaagcgtgggctattacgtctggatccctgagcgttaaagtagcagtcctggatacagggatcgaccataatcacccatccttggccaacttcgtgaatactaatcttggccgctcgtttgttggaggaaacaccatggatgttcaaggtcatggcacacatgttgctggcacgattgcatcttatgggagtgtaagcggagtgatgcagagtgcgacactgatcccggtcaaagtgctcgataattctggcagcgggtccctttacggtattacgcaaggcatattgtatgccgccgacatcgatgcggacgtcattaacatgtctctgggtggaggaggctataatcagagcatggatgaggctgttcaaacagcagttgctcagggaaccattgtagtagcagcgactggcaatgatggtgcatcgtcgatcagttatcctgctgcctacagcagcgtcattgcggtgggatctgtggactccaatcgtgttcgatcctcgttttctaactatggatctgggcttgaagttatggcaccgggcagcaacatctacagtacgtatcctaattccagatatacatctttgagtggtacaagcatggctactccgcacgttgcgggcgtagctgggctcattcgcgcagccaacccagacatagtggtcgcgcaagcccgtcagattctgcgggataccgcgcaagaagcaggatcgttcacacagtacggctatggaatcgtcgatgctcatgccgccgttgttgctgcatccggtggtagcggcggc

SEQ ID NO: 968 - protein, 413 aa, synthetic construct
  REGION 1..413: note = Variant of serine peptidase from Bacillus sinesaloumensis
MADQASQANGNQDVIEGELIVSVEPKNGKPDVSIQSAQSVTGQEDVLKSKGFTIVDTLHVEDSSVKPLVSKNFNKKVVEKMGLVYLVQYSPDQFKSSNIAKKELRKELMDLGFKVRYISENYKMMAIEGTATLQGVHPNLVWHYNMIKAPEAWAITSGSLSVKVAVLDTGIDHNHPSLANFVNTNLGRSFVGGNTMDVQGHGTHVAGTIASYGSVSGVMQSATLIPVKVLDNSGSGSLYGITQGILYAADIDADVINMSLGGGGYNQSMDEAVQTAVAQGTIVVAATGNDGASSISYPAAYSSVIAVGSVDSNRVRSSFSNYGSGLEVMAPGSNIYSTYPNSRYTSLSGTSMATPHVAGVAGLIRAANPDIVVAQARQILRDTAQEAGSFTQYGYGIVDAHAAVVAASGGSGG

SEQ ID NO: 969 - DNA, 1239 bp, synthetic construct
  misc_feature 1..1239: note = Variant of serine peptidase from Bacillus sinesaloumensis
  source 1..1239: mol_type = other DNA
atggcagatcaagctagtcaagctaatggaaaccaggacgtcattgaaggcgagctgatcgtttcagtggaaccgaagaacggtaaacctgatgtgagcattcaaagtgcacaatccgtaacagggcaggaagacgtccttaaatcgaaaggctttacgatcgttgataccttgcatgtagaggatagcagcgtcaagccactcgtctcgaagaatttcaataagaaagtggtggagaagatgggactggtgtatcttgttcaatactctccggaccagtttaaaagttccaacattgcgaagaaagaactcagaaaagaattgatggatctgggctttaaagtccgctatataagcgaaaattacaagatgatggcgatcgaaggtacagccactcttcagggggtgcaccctaaccaagtttggcattataatatgattaaagctccggaagcgtgggctattacgtctggatccctgagcgttaaagtagcagtcctggatacagggatcgaccataatcacccatccttggccaacttcgtgaatactaatcttggccgctcgtttgttggaggaaacaccatggatgttcaaggtcatggcacacatgttgctggcacgattgcatcttatgggagtgtaagcggagtgatgcagagtgcgacactgatcccggtcaaagtgctcgataattctggcagcgggtccctttacggtattacgcaaggcatattgtatgccgccgacatcgatgcggacgtcattaacatgtctctgggtggaggaggctataatcagactatggatgaggctgttcaaacagcagttgctcagggaaccattgtagtagcagcgactggcaatgatggtgcatcgtcgatcagttatcctgctgcctacagcagcgtcattgcggtgggatctgtggactccaatcgtgttcgatcctcgttttctaactatggatctgggcttgaagttatggcaccgggcagcaacatctacagtacgtatcctaattccagatatacatctttgagtggtacaagcatggctactccgcacgttgcgggcgtagctgggctcattcgcgcagccaacccagacatagtggtcgcgcaagcccgtcagattctgcgggataccgcgcaagaagcaggatcgttcacacagtacggctatggaatcgtcgatgctcatgccgccgttgttgctgcatccggtggtagcggcggc

SEQ ID NO: 970 - protein, 413 aa, synthetic construct
  REGION 1..413: note = Variant of serine peptidase from Bacillus sinesaloumensis
MADQASQANGNQDVIEGELIVSVEPKNGKPDVSIQSAQSVTGQEDVLKSKGFTIVDTLHVEDSSVKPLVSKNFNKKVVEKMGLVYLVQYSPDQFKSSNIAKKELRKELMDLGFKVRYISENYKMMAIEGTATLQGVHPNQVWHYNMIKAPEAWAITSGSLSVKVAVLDTGIDHNHPSLANFVNTNLGRSFVGGNTMDVQGHGTHVAGTIASYGSVSGVMQSATLIPVKVLDNSGSGSLYGITQGILYAADIDADVINMSLGGGGYNQTMDEAVQTAVAQGTIVVAATGNDGASSISYPAAYSSVIAVGSVDSNRVRSSFSNYGSGLEVMAPGSNIYSTYPNSRYTSLSGTSMATPHVAGVAGLIRAANPDIVVAQARQILRDTAQEAGSFTQYGYGIVDAHAAVVAASGGSGG

SEQ ID NO: 971 - DNA, 1239 bp, synthetic construct
  misc_feature 1..1239: note = Variant of serine peptidase from Bacillus sinesaloumensis
  source 1..1239: mol_type = other DNA
atggcagatcaagctagtcaagctaatggaaaccaggacgtcattgaaggcgagctgatcgtttcagtggaaccgaagaacggtaaacctgatgtgagcattcaaagtgcacaatccgtaacagggcaggaagacgtccttaaatcgaaaggctttacgatcgttgataccttgcatgtagaggatagcagcgtcaagccactcgtctcgaagaatttcaataagaaagtggtggagaagatgggactggtgtatcttgttcaatactctccggaccagtttaaaagttccaacattgcgaagaaagaactcagaaaagaattgatggatctgggctttaaagtccgctatataagcgaaaattacaagatgatggcgatcgaaggtacagccactcttcagggggtgcaccctaaccaagtttggcattataatatgattaaagctccggaagcgtgggctattacgtctggatccctgagcgttaaagtagcagtcctggatacagggatcgaccataatcacccatccttggccaacttcgtgaatactaatcttggccgctcgtttgttggaggaaacaccatggatgttcaaggtcatggcacacatgttgctggcacgattgcatcttatgggagtgtaagcggagtgatgcagagtgcgacactgatcccggtcaaagtgctcgataattctggcagcgggtccctttacggtattacgcaaggcatattgtatgccgccgacatcgatgcggacgtcattaacatgtctctgggtggaggaggctataatcagagcatggatgaggctgttcaaacagcagttgctcagggaaccattgtagtagcagcgactggcaatgatggtgcatcgtcgatcagttatcctgctgcctacagcagcgtcattgcggtgggatctgtggactccaatcgtgttcgatcctcgttttctaactatggatctgggcttgaagttatggcaccgggcagcaacatctacagtacgtatcctaattccagatatacatctttgagtggtacaagcatggctactccgcacgttgcgggcgtagctgggctcattcgcgcagccaacccagacatagtggtcgcgcaagcccgtcagattctgcgggataccgcgcaagaagcaggatcgttcacacagtacggctatggaatcgtcgatgctcatgccgccgttgttgctgcatccggtggtctgggcggc

SEQ ID NO: 972 - protein, 413 aa, synthetic construct
  REGION 1..413: note = Variant of serine peptidase from Bacillus sinesaloumensis
MADQASQANGNQDVIEGELIVSVEPKNGKPDVSIQSAQSVTGQEDVLKSKGFTIVDTLHVEDSSVKPLVSKNFNKKVVEKMGLVYLVQYSPDQFKSSNIAKKELRKELMDLGFKVRYISENYKMMAIEGTATLQGVHPNQVWHYNMIKAPEAWAITSGSLSVKVAVLDTGIDHNHPSLANFVNTNLGRSFVGGNTMDVQGHGTHVAGTIASYGSVSGVMQSATLIPVKVLDNSGSGSLYGITQGILYAADIDADVINMSLGGGGYNQSMDEAVQTAVAQGTIVVAATGNDGASSISYPAAYSSVIAVGSVDSNRVRSSFSNYGSGLEVMAPGSNIYSTYPNSRYTSLSGTSMATPHVAGVAGLIRAANPDIVVAQARQILRDTAQEAGSFTQYGYGIVDAHAAVVAASGGLGG

SEQ ID NO: 973 - DNA, 1239 bp, synthetic construct
  misc_feature 1..1239: note = Variant of serine peptidase from Bacillus sinesaloumensis
  source 1..1239: mol_type = other DNA
atggcagatcaagctagtcaagctaatggaaaccaggacgtcattgaaggcgagctgatcgtttcagtggaaccgaagaacggtaaacctgatgtgagcattcaaagtgcacaatccgtaacagggcaggaagacgtccttaaatcgaaaggctttacgatcgttgataccttgcatgtagaggatagcagcgtcaagccactcgtctcgaagaatttcaataagaaagtggtggagaagatgggactggtgtatcttgttcaatactctccggaccagtttaaaagttccaacattgcgaagaaagaactcagaaaagaattgatggatctgggctttaaagtccgctatataagcgaaaattacaagatgatggcgatcgaaggtacagccactcttcagggggtgcaccctaaccaagtttggcattataatatgattaaagctccggaagcgtgggctattacgtctggatccctgagcgttaaagtagcagtcctggatacagggatcgaccataatcacccatccttggccaacttcgtgaatactaatcttggccgctcgtttgttggaggaaacaccatggatgttcaaggtcatggcacacatgttgctggcacgattgcatcttatgggagtgtaagcggagtgatgcagagtgcgacactggtgccggtcaaagtgctcgataattctggcagcgggtccctttacggtattacgcaaggcatattgtatgccgccgacatcgatgcggacgtcattaacatgtctctgggtggaggaggctataatcagagcatggatgaggctgttcaaacagcagttgctcagggaaccattgtagtagcagcgactggcaatgatggtgcatcgtcgatcagttatcctgctgcctacagcagcgtcattgcggtgggatctgtggactccaatcgtgttcgatcctcgttttctaactatggatctgggcttgaagttatggcaccgggcagcaacatctacagtacgtatcctaattccagatatacatctttgagtggtacaagcatggctactccgcacgttgcgggcgtagctgggctcattcgcgcagccaacccagacatagtggtcgcgcaagcccgtcagattctgcgggataccgcgcaagaagcaggatcgttcacacagtacggctatggaatcgtcgatgctcatgccgccgttgttgctgcatccggtggtagcggcggc

SEQ ID NO: 974 - protein, 413 aa, synthetic construct
  REGION 1..413: note = Variant of serine peptidase from Bacillus sinesaloumensis
MADQASQANGNQDVIEGELIVSVEPKNGKPDVSIQSAQSVTGQEDVLKSKGFTIVDTLHVEDSSVKPLVSKNFNKKVVEKMGLVYLVQYSPDQFKSSNIAKKELRKELMDLGFKVRYISENYKMMAIEGTATLQGVHPNQVWHYNMIKAPEAWAITSGSLSVKVAVLDTGIDHNHPSLANFVNTNLGRSFVGGNTMDVQGHGTHVAGTIASYGSVSGVMQSATLVPVKVLDNSGSGSLYGITQGILYAADIDADVINMSLGGGGYNQSMDEAVQTAVAQGTIVVAATGNDGASSISYPAAYSSVIAVGSVDSNRVRSSFSNYGSGLEVMAPGSNIYSTYPNSRYTSLSGTSMATPHVAGVAGLIRAANPDIVVAQARQILRDTAQEAGSFTQYGYGIVDAHAAVVAASGGSGG

SEQ ID NO: 975 - DNA, 1239 bp, synthetic construct
  misc_feature 1..1239: note = Variant of serine peptidase from Bacillus sinesaloumensis
  source 1..1239: mol_type = other DNA
atggcagatcaagctagtcaagctaatggaaaccaggacgtcattgaaggcgagctgatcgtttcagtggaaccgaagaacggtaaacctgatgtgagcattcaaagtgcacaatccgtaacagggcaggaagacgtccttaaatcgaaaggctttacgatcgttgataccttgcatgtagaggatagcagcgtcaagccactcgtctcgaagaatttcaataagaaagtggtggagaagatgggactggtgtatcttgttcaatactctccggaccagtttaaaagttccaacattgcgaagaaagaactcagaaaagaattgatggatctgggctttaaagtccgctatataagcgaaaattacaagatgatggcgatcgaaggtacagccactcttcagggggtgcaccctaaccaagtttggcattataatatgattaaagctccggaagcgtgggctattacgtctggatccctgagcgttaaagtagcagtcctggatacagggatcgaccataatcacccatccttggccaacttcgtgaatactaatcttggccgctcgtttgttggaggaaacaccatggatgttcaaggtcatggcacacatgttgctggcacgattgcatcttatgggagtgtaagcggagtgatgcagagtgcgacactgatcccggtcaaagtgctcgataattctggcagcgggtccctttacggtattacgcaaggcctgttgtatgccgccgacatcgatgcggacgtcattaacatgtctctgggtggaggaggctataatcagagcatggatgaggctgttcaaacagcagttgctcagggaaccattgtagtagcagcgactggcaatgatggtgcatcgtcgatcagttatcctgctgcctacagcagcgtcattgcggtgggatctgtggactccaatcgtgttcgatcctcgttttctaactatggatctgggcttgaagttatggcaccgggcagcaacatctacagtacgtatcctaattccagatatacatctttgagtggtacaagcatggctactccgcacgttgcgggcgtagctgggctcattcgcgcagccaacccagacatagtggtcgcgcaagcccgtcagattctgcgggataccgcgcaagaagcaggatcgttcacacagtacggctatggaatcgtcgatgctcatgccgccgttgttgctgcatccggtggtagcggcggc

SEQ ID NO: 976 - protein, 413 aa, synthetic construct
  REGION 1..413: note = Variant of serine peptidase from Bacillus sinesaloumensis
MADQASQANGNQDVIEGELIVSVEPKNGKPDVSIQSAQSVTGQEDVLKSKGFTIVDTLHVEDSSVKPLVSKNFNKKVVEKMGLVYLVQYSPDQFKSSNIAKKELRKELMDLGFKVRYISENYKMMAIEGTATLQGVHPNQVWHYNMIKAPEAWAITSGSLSVKVAVLDTGIDHNHPSLANFVNTNLGRSFVGGNTMDVQGHGTHVAGTIASYGSVSGVMQSATLIPVKVLDNSGSGSLYGITQGLLYAADIDADVINMSLGGGGYNQSMDEAVQTAVAQGTIVVAATGNDGASSISYPAAYSSVIAVGSVDSNRVRSSFSNYGSGLEVMAPGSNIYSTYPNSRYTSLSGTSMATPHVAGVAGLIRAANPDIVVAQARQILRDTAQEAGSFTQYGYGIVDAHAAVVAASGGSGG

SEQ ID NO: 977 - DNA, 1239 bp, synthetic construct
  misc_feature 1..1239: note = Variant of serine peptidase from Bacillus sinesaloumensis
  source 1..1239: mol_type = other DNA
atggcagatcaagctagtcaagctaatggaaaccaggacgtcattgaaggcgagctgatcgtttcagtggaaccgaagaacggtaaacctgatgtgagcattcaaagtgcacaatccgtaacagggcaggaagacgtccttaaatcgaaaggctttacgatcgttgataccttgcatgtagaggatagcagcgtcaagccactcgtctcgaagaatttcaataagaaagtggtggagaagatgggactggtgtatcttgttcaatactctccggaccagtttaaaagttccaacattgcgaagaaagaactcagaaaagaattgatggatctgggctttaaagtccgctatataagcgaaaattacaagatgatggcgatcgaaggtacagccactcttcagggggtgcaccctaaccaagtttggcattataatatgattaaagctccggaagcgtgggctattacgtctggatccctgagcgttaaagtagcagtcctggatacagggatcgaccataatcacccatccttggccaacttcgtgaatactaatcttggccgctcgtttgttggaggaaacaccatggatgttcaaggtcatggcacacatgttgctggcacgattgcatcttatgggagtgtaagcggagtgatgcagagtgcgacactgatcccggtcaaagtgctcgataattctggcagcgggtccctttacggtattacgcaaggcatattgtatgccgccgacatcgatgcggacgtcattaacatgtctctgggtggaggaggctataatcagagcatggatgaggctgttcaaacagcagttgctcagggaaccattatggtagcagcgactggcaatgatggtgcatcgtcgatcagttatcctgctgcctacagcagcgtcattgcggtgggatctgtggactccaatcgtgttcgatcctcgttttctaactatggatctgggcttgaagttatggcaccgggcagcaacatctacagtacgtatcctaattccagatatacatctttgagtggtacaagcatggctactccgcacgttgcgggcgtagctgggctcattcgcgcagccaacccagacatagtggtcgcgcaagcccgtcagattctgcgggataccgcgcaagaagcaggatcgttcacacagtacggctatggaatcgtcgatgctcatgccgccgttgttgctgcatccggtggtagcggcggc

SEQ ID NO: 978 - protein, 413 aa, synthetic construct
  REGION 1..413: note = Variant of serine peptidase from Bacillus sinesaloumensis
MADQASQANGNQDVIEGELIVSVEPKNGKPDVSIQSAQSVTGQEDVLKSKGFTIVDTLHVEDSSVKPLVSKNFNKKVVEKMGLVYLVQYSPDQFKSSNIAKKELRKELMDLGFKVRYISENYKMMAIEGTATLQGVHPNQVWHYNMIKAPEAWAITSGSLSVKVAVLDTGIDHNHPSLANFVNTNLGRSFVGGNTMDVQGHGTHVAGTIASYGSVSGVMQSATLIPVKVLDNSGSGSLYGITQGILYAADIDADVINMSLGGGGYNQSMDEAVQTAVAQGTIMVAATGNDGASSISYPAAYSSVIAVGSVDSNRVRSSFSNYGSGLEVMAPGSNIYSTYPNSRYTSLSGTSMATPHVAGVAGLIRAANPDIVVAQARQILRDTAQEAGSFTQYGYGIVDAHAAVVAASGGSGG

SEQ ID NO: 979 - DNA, 1239 bp, synthetic construct
  misc_feature 1..1239: note = Variant of serine peptidase from Bacillus sinesaloumensis
  source 1..1239: mol_type = other DNA
atggcagatcaagctagtcaagctaatggaaaccaggacgtcattgaaggcgagctgatcgtttcagtggaaccgaagaacggtaaacctgatgtgagcattcaaagtgcacaatccgtaacagggcaggaagacgtccttaaatcgaaaggctttacgatcgttgataccttgcatgtagaggatagcagcgtcaagccactcgtctcgaagaatttcaataagaaagtggtggagaagatgggactggtgtatcttgttcaatactctccggaccagtttaaaagttccaacattgcgaagaaagaactcagaaaagaattgatggatctgggctttaaagtccgctatataagcgaaaattacaagatgatggcgatcgaaggtacagccactcttcagggggtgcaccctaaccaagtttggcattataatatgattaaagctccggaagcgtgggctattacgtctggatccctgagcgttaaagtagcagtcctggatacagggatcgaccataatcacccatccttggccaacttcgtgaatactaatcttggccgctcgtttgttggaggaaacaccatggatgttcaaggtcatggcacacatgttgctggcacgattgcatcttatgggagtgtaagcggagtgatgcagagtgcgacactgatcccggtcaaagtgctcgataattctggcagcgggtccctttacggtattacgcaaggcatattgtatgccgccgacatcgatgcggacgtcattaacatgtctctgggtggaggaggctataatcagagcatggatgaggctgttcaaacagcagttgctcagggaaccattgtagtagcagcgactggcaatgatggtgcatcgtcgatcagttatcctgctgcctacagcagcgtcattgcggtgggatctgtggactccaatcgtgttcgatcctcgttttctaactatggatctgggcttgaagttatggcaccgggcagcaacatctacagtacgtatcctaattccagatatacatctttgagtggtacaagcatggctactccgcacgttgcgggcgtagctgggctcattcgcgcagccaacccagacatagtggtcgcgcaagcccgtcagattctgcgggataccgcgcaagaagcaggatcgttcacacagtacggctatggaatcgtcgatgctcatgccgccgttgtttgggcatccggtggtagcggcggc

SEQ ID NO: 980 - protein, 413 aa, synthetic construct
  REGION 1..413: note = Variant of serine peptidase from Bacillus sinesaloumensis
MADQASQANGNQDVIEGELIVSVEPKNGKPDVSIQSAQSVTGQEDVLKSKGFTIVDTLHVEDSSVKPLVSKNFNKKVVEKMGLVYLVQYSPDQFKSSNIAKKELRKELMDLGFKVRYISENYKMMAIEGTATLQGVHPNQVWHYNMIKAPEAWAITSGSLSVKVAVLDTGIDHNHPSLANFVNTNLGRSFVGGNTMDVQGHGTHVAGTIASYGSVSGVMQSATLIPVKVLDNSGSGSLYGITQGILYAADIDADVINMSLGGGGYNQSMDEAVQTAVAQGTIVVAATGNDGASSISYPAAYSSVIAVGSVDSNRVRSSFSNYGSGLEVMAPGSNIYSTYPNSRYTSLSGTSMATPHVAGVAGLIRAANPDIVVAQARQILRDTAQEAGSFTQYGYGIVDAHAAVVWASGGSGG

SEQ ID NO: 981 - DNA, 1239 bp, synthetic construct
  misc_feature 1..1239: note = Variant of serine peptidase from Bacillus sinesaloumensis
  source 1..1239: mol_type = other DNA
atggcagatcaagctagtcaagctaatggaaaccaggacgtcattgaaggcgagctgatcgtttcagtggaaccgaagaacggtaaacctgatgtgagcattcaaagtgcacaatccgtaacagggcaggaagacgtccttaaatcgaaaggctttacgatcgttgataccttgcatgtagaggatagcagcgtcaagccactcgtctcgaagaatttcaataagaaagtggtggagaagatgggactggtgtatcttgttcaatactctccggaccagtttaaaagttccaacattgcgaagaaagaactcagaaaagaattgatggatctgggctttaaagtccgctatataagcgaaaattacaagatgatggcgatcgaaggtacagccactcttcagggggtgcaccctaaccaagtttggcattataatatgattaaagctccggaagcgtgggctattacgtctggatccctgagcgttaaagtagcagtcctggatacagggatcgaccataatcacccatccttggccaacttcgtgaatactaatcttggccgctcgtttgttggaggaaacaccatggatgttcaaggtcatggcacacatgttgctggcacgattgcatcttatgggagtgtaagcggagtgatgcagagtgcgacactgatcccggtcaaagtgctcgataattctggcagcgggtccctttacggtattacgcaaggcatattgtatgccgccgacatcgatgcggacgtcattaacatgtctctgggtggaggaggctataatcagagcatggatgaggctgttcaaacagcagttgctcagggaaccattgtagtagcagcgactggcaatgatggtgcatcgtcgatcagttatcctgctgcctacagcagcgtcattgcggtgggatctgtggactccaatcgtgttcgatcctcgttttctaactatggatctgggcttgaagttatggcaccgggcagcaacatctacagtacgtatcctaattccagatatacatctttgagtggtacaagcatggctactccgcacgttgcgggcgtagctgggctcattcgcgcagccaacccagacatagtggtcgcgcaagcccgtcagattctgcgggataccgcgcaagaagcaggatcgttcacacagtacggctatggaatcgtcgatgctcatgccgccgttgttgctgcatccggttgtagcggcggc

SEQ ID NO: 982 - protein, 413 aa, synthetic construct
  REGION 1..413: note = Variant of serine peptidase from Bacillus sinesaloumensis
MADQASQANGNQDVIEGELIVSVEPKNGKPDVSIQSAQSVTGQEDVLKSKGFTIVDTLHVEDSSVKPLVSKNFNKKVVEKMGLVYLVQYSPDQFKSSNIAKKELRKELMDLGFKVRYISENYKMMAIEGTATLQGVHPNQVWHYNMIKAPEAWAITSGSLSVKVAVLDTGIDHNHPSLANFVNTNLGRSFVGGNTMDVQGHGTHVAGTIASYGSVSGVMQSATLIPVKVLDNSGSGSLYGITQGILYAADIDADVINMSLGGGGYNQSMDEAVQTAVAQGTIVVAATGNDGASSISYPAAYSSVIAVGSVDSNRVRSSFSNYGSGLEVMAPGSNIYSTYPNSRYTSLSGTSMATPHVAGVAGLIRAANPDIVVAQARQILRDTAQEAGSFTQYGYGIVDAHAAVVAASGCSGG

SEQ ID NO: 983 - DNA, 1239 bp, synthetic construct
  misc_feature 1..1239: note = Variant of serine peptidase from Bacillus sinesaloumensis
  source 1..1239: mol_type = other DNA
atggcagatcaagctagtcaagctaatggaaaccaggacgtcattgaaggcgagctgatcgtttcagtggaaccgaagaacggtaaacctgatgtgagcattcaaagtgcacaatccgtaacagggcaggaagacgtccttaaatcgaaaggctttacgatcgttgataccttgcatgtagaggatagcagcgtcaagccactcgtctcgaagaatttcaataagaaagtggtggagaagatgggactggtgtatcttgttcaatactctccggaccagtttaaaagttccaacattgcgaagaaagaactcagaaaagaattgatggatctgggctttaaagtccgctatataagcgaaaattacaagatgatggcgatcgaaggtacagccactcttcagggggtgcaccctaaccaagtttggcattataatatgattaaagctccggaagcgtgggctattacgtctggatccctgagcgttaaagtagcagtcctggatacagggatcgaccataatcacccatccttggccaacttcgtgaatactaatcttggccgctcgtttgttggaggaaacaccatggatgttcaaggtcatggcacacatgttgctggcacgattgcatcttatgggagtgtaagcggagtgatgcagagtgcgacactgatcccggtcaaagtgctcgataattctggcagcgggtccctttacggtattacgcaaggcatattgtatgccgccgacatcgatgcggacgtcattaacatgtctctgggtggaggaggctataatcagagcatggatgaggctgttcaaacagcagttgctcagggaaccattgtagtagcagcgactggcaatgatggtgcatcgtcgatcagttatcctgctgcctacagcagcgtcattgcggtgggatctgtggactccaatcgtgttcgatcctcgttttctaactatggatctgggcttgaagttatggcaccgggcagcaacatctacagtacgtatcctaattccagatatacatctttgagtggtacaagcatggctactccgcacgttgcgggcgtagctgggctcattcgcgcagccaacccagacatagtggtcgcgcaagcccgtcagattctgcgggataccgcgcaagaagcaggatcgttcacacagtacggctatggaatcgtcgatgctcatgccgccgttgtttgtgcatccggtggtagcggcggc

SEQ ID NO: 984 - protein, 413 aa, synthetic construct
  REGION 1..413: note = Variant of serine peptidase from Bacillus sinesaloumensis
MADQASQANGNQDVIEGELIVSVEPKNGKPDVSIQSAQSVTGQEDVLKSKGFTIVDTLHVEDSSVKPLVSKNFNKKVVEKMGLVYLVQYSPDQFKSSNIAKKELRKELMDLGFKVRYISENYKMMAIEGTATLQGVHPNQVWHYNMIKAPEAWAITSGSLSVKVAVLDTGIDHNHPSLANFVNTNLGRSFVGGNTMDVQGHGTHVAGTIASYGSVSGVMQSATLIPVKVLDNSGSGSLYGITQGILYAADIDADVINMSLGGGGYNQSMDEAVQTAVAQGTIVVAATGNDGASSISYPAAYSSVIAVGSVDSNRVRSSFSNYGSGLEVMAPGSNIYSTYPNSRYTSLSGTSMATPHVAGVAGLIRAANPDIVVAQARQILRDTAQEAGSFTQYGYGIVDAHAAVVCASGGSGG

SEQ ID NO: 985 - DNA, 1239 bp, synthetic construct
  misc_feature 1..1239: note = Variant of serine peptidase from Bacillus sinesaloumensis
  source 1..1239: mol_type = other DNA
atggcagatcaagctagtcaagctaatggaaaccaggacgtcattgaaggcgagctgatcgtttcagtggaaccgaagaacggtaaacctgatgtgagcattcaaagtgcacaatccgtaacagggcaggaagacgtccttaaatcgaaaggctttacgatcgttgataccttgcatgtagaggatagcagcgtcaagccactcgtctcgaagaatttcaataagaaagtggtggagaagatgggactggtgtatcttgttcaatactctccggaccagtttaaaagttccaacattgcgaagaaagaactcagaaaagaattgatggatctgggctttaaagtccgctatataagcgaaaattacaagatgatggcgatcgaaggtacagccactcttcagggggtgcaccctaaccaagtttgggcgtatgagatgattaaagctccggaagcgtgggctattacgtctggatccctgagcgttaaagtagcagtcctggatacagggatcgaccataatcacccatccttggccaacttcgtgaatactaatcttggccgctcgtttgttggaggaaacaccatggatgttcaaggtcatggcacacatgttgctggcacgattgcatcttatgggagtgtaagcggagtgatgcagagtgcgacactgatcccggtcaaagtgctcgataattctggcagcgggtccctttacggtattacgctgggcatattgtatgccgccgacatcgatgcggacgtcattaacatgtctctgggtgggggaggctataatcagagcatggatgaggctgttcaaacagcagttgctcagggaaccattgtagtagcagcgactggcaatgatggtgcatcgtcgatcagttatcctgctgcctacagcagcgtcattgcggtgggatctgtggacattaatcgtgttcgatcctcgttttctaactatggatctgggcttgaagtgatggcaccgggcagcaacatctacagtacgtatcctaattccagatatacatctttgagtggtacaagcatggctactccgcacgttgcgggcgtagctgggctcattcgcgcagccaacccagacatagtggtcgcgcaagcccgtcagattctgcgggataccgcgcaagaagcaggatcgttcacacagtacggctatggaatcgtcgatgctcatgccgccgttgttgctgcatccggtggtagcggcggc

SEQ ID NO: 986 - protein, 413 aa, synthetic construct
  REGION 1..413: note = Variant of serine peptidase from Bacillus sinesaloumensis
MADQASQANGNQDVIEGELIVSVEPKNGKPDVSIQSAQSVTGQEDVLKSKGFTIVDTLHVEDSSVKPLVSKNFNKKVVEKMGLVYLVQYSPDQFKSSNIAKKELRKELMDLGFKVRYISENYKMMAIEGTATLQGVHPNQVWAYEMIKAPEAWAITSGSLSVKVAVLDTGIDHNHPSLANFVNTNLGRSFVGGNTMDVQGHGTHVAGTIASYGSVSGVMQSATLIPVKVLDNSGSGSLYGITLGILYAADIDADVINMSLGGGGYNQSMDEAVQTAVAQGTIVVAATGNDGASSISYPAAYSSVIAVGSVDINRVRSSFSNYGSGLEVMAPGSNIYSTYPNSRYTSLSGTSMATPHVAGVAGLIRAANPDIVVAQARQILRDTAQEAGSFTQYGYGIVDAHAAVVAASGGSGG

SEQ ID NO: 987 - DNA, 1239 bp, synthetic construct
  misc_feature 1..1239: note = Variant of serine peptidase from Bacillus sinesaloumensis
  source 1..1239: mol_type = other DNA
atggcagatcaagctagtcaagctaatggaaaccaggacgtcattgaaggcgagctgatcgtttcagtggaaccgaagaacggtaaacctgatgtgagcattcaaagtgcacaatccgtaacagggcaggaagacgtccttaaatcgaaaggctttacgatcgttgataccttgcatgtagaggatagcagcgtcaagccactcgtctcgaagaatttcaataagaaagtggtggagaagatgggactggtgtatcttgttcaatactctccggaccagtttaaaagttccaacattgcgaagaaagaactcagaaaagaattgatggatctgggctttaaagtccgctatataagcgaaaattacaagatgatggcgatcgaaggtacagccactcttcagggggtgcaccctctgcaagtttgggcgtatgagatgattaaagctccggaagcgtgggctattacgggtggatccctgagcgttaaagtagcagtcctggatacagggatcgaccataatcacccatccttggccaacttcgtgaatactaatcttggccgctcgtttgttggaggaaacaccatggatgttcaaggtcatggcacacatgttgctggcacgattgcatcttatgggagtgtaagcggagtgatgcagagtgcgacactgatcccggtcaaagtgctcgataattctggcagcgggtccctttacggtattacgcaaggcatattgtatgccgccgacatcgatgcggacgtcattaacatgtctctgggtggaggaggctataatcagagcatggatgaggctgttcaaacagcagttgctcagggaaccattgtagtagcagcgactggcaatgatggtgcatcgtcgatcagttatcctgctgcctacagcagcgtcattgcggtgggatctgtggacattaatcgtgttcgatcctcgttttctaactatggatctgggcttgaagttatggcaccgggcagcaacatctacagtacgtatcctaattccagatatacatctttgagtggtacaagcatggctactccgcacgttgcgggcgtagctgggctcattcgcgcagccaacccagacatagtggtcgcgcaagcccgtcagattctgcgggataccgcgcaagaagcaggatcgttcacacagtacggctatggaatcgtcgatgctcatgccgccgttgttgctgcatccggtggtagcggcggc

SEQ ID NO: 988 - protein, 413 aa, synthetic construct
  REGION 1..413: note = Variant of serine peptidase from Bacillus sinesaloumensis
MADQASQANGNQDVIEGELIVSVEPKNGKPDVSIQSAQSVTGQEDVLKSKGFTIVDTLHVEDSSVKPLVSKNFNKKVVEKMGLVYLVQYSPDQFKSSNIAKKELRKELMDLGFKVRYISENYKMMAIEGTATLQGVHPLQVWAYEMIKAPEAWAITGGSLSVKVAVLDTGIDHNHPSLANFVNTNLGRSFVGGNTMDVQGHGTHVAGTIASYGSVSGVMQSATLIPVKVLDNSGSGSLYGITQGILYAADIDADVINMSLGGGGYNQSMDEAVQTAVAQGTIVVAATGNDGASSISYPAAYSSVIAVGSVDINRVRSSFSNYGSGLEVMAPGSNIYSTYPNSRYTSLSGTSMATPHVAGVAGLIRAANPDIVVAQARQILRDTAQEAGSFTQYGYGIVDAHAAVVAASGGSGG

SEQ ID NO: 989 - DNA, 1239 bp, synthetic construct
  misc_feature 1..1239: note = Variant of serine peptidase from Bacillus sinesaloumensis
  source 1..1239: mol_type = other DNA
atggcagatcaagctagtcaagctaatggaaaccaggacgtcattgaaggcgagctgatcgtttcagtggaaccgaagaacggtaaacctgatgtgagcattcaaagtgcacaatccgtaacagggcaggaagacgtccttaaatcgaaaggctttacgatcgttgataccttgcatgtagaggatagcagcgtcaagccactcgtctcgaagaatttcaataagaaagtggtggagaagatgggactggtgtatcttgttcaatactctccggaccagtttaaaagttccaacattgcgaagaaagaactcagaaaagaattgatggatctgggctttaaagtccgctatataagcgaaaattacaagatgatggcgatcgaaggtacagccactcttcagggggtgcacccttgtcaagtttggcattataatatgattaaagctccggaagcgtgggctattacgggtggatccctgagcgttaaagtagcagtcctggataccgggatcgaccataatcacccatccttggccaacttcgtgaatactaatcttggccgctcgtttgttggaggaaacaccatggatgttcaaggtcatggcacacatgttgctggcacgattgcatcttatgggagtgtaagcggagtgatgcagagtgcgacactgatcccggtcaaagtgctcgataattctggcagcgggtccctttacggtattacgcagggcatattgtatgccgccgacatcgatgcggacgtcattaacatgtctctgggtggaggaggctataatcagagcatggatgaggctgttcaaacagcagttgctcagggaaccattgtagtagcagcgactggcaatgatggtgcatcgtcgatcagttatcctgctgcctacagcagcgtcattgcggtgggatctgtggactccaatcgtgttcgatcctcgttttctaactatggatctgggcttgaagtgatggcaccgggcagcaacatctacagtacgtatcctaatagcagatatcgcagtttgagtggtacaagcatggctactccgcacgttgcgggcgtagctgggctcattcgcgcagccaacccagacatagtggtcgcgcaagcccgtcagattctgcgggataccgcgcaagaagcaggatcgttcacacagtacggctatggaatcgtcgatgctcatgccgccgttgttgctgcatccggtggtagcggcggc

SEQ ID NO: 990 - protein, 413 aa, synthetic construct
  REGION 1..413: note = Variant of serine peptidase from Bacillus sinesaloumensis
MADQASQANGNQDVIEGELIVSVEPKNGKPDVSIQSAQSVTGQEDVLKSKGFTIVDTLHVEDSSVKPLVSKNFNKKVVEKMGLVYLVQYSPDQFKSSNIAKKELRKELMDLGFKVRYISENYKMMAIEGTATLQGVHPCQVWHYNMIKAPEAWAITGGSLSVKVAVLDTGIDHNHPSLANFVNTNLGRSFVGGNTMDVQGHGTHVAGTIASYGSVSGVMQSATLIPVKVLDNSGSGSLYGITQGILYAADIDADVINMSLGGGGYNQSMDEAVQTAVAQGTIVVAATGNDGASSISYPAAYSSVIAVGSVDSNRVRSSFSNYGSGLEVMAPGSNIYSTYPNSRYRSLSGTSMATPHVAGVAGLIRAANPDIVVAQARQILRDTAQEAGSFTQYGYGIVDAHAAVVAASGGSGG

SEQ ID NO: 991 - DNA, 1239 bp, synthetic construct
  misc_feature 1..1239: note = Variant of serine peptidase from Bacillus sinesaloumensis
  source 1..1239: mol_type = other DNA
atggcagatcaagctagtcaagctaatggaaaccaggacgtcattgaaggcgagctgatcgtttcagtggaaccgaagaacggtaaacctgatgtgagcattcaaagtgcacaatccgtaacagggcaggaagacgtccttaaatcgaaaggctttacgatcgttgataccttgcatgtagaggatagcagcgtcaagccactcgtctcgaagaatttcaataagaaagtggtggagaagatgggactggtgtatcttgttcaatactctccggaccagtttaaaagttccaacattgcgaagaaagaactcagaaaagaattgatggatctgggctttaaagtccgctatataagcgaaaattacaagatgatggcgatcgaaggtacagccactcttcagggggtgcacccttgtcaagtttggcattataatatgattaaagctccggaagcgtgggctattacgtctggatccctgagcgttaaagtagcagtcctggatacagggatcgaccataatcacccatccttggccaacttcgtgaatactaatcttggccgctcgtttgttggaggaaacaccatggatgttcaaggtcatggcacacatgttgctggcacgattgcatcttatgggagtgtaagcggagtgatgcagagtgcgacactgatcccggtcaaagtgctcgataattctggcagcgggtccctttacggtattacgcaaggcatattgtatgccgccgacatcgatgcggacgtcattaacatgtctctgggtggaggaggctataatcagagccaggatgaggctgttcaaacagcagttgctcagggaaccattgtagtagcagcgactggcaatgatggtgcatcgtcgatcagttatcctgctgcctacagcagcgtcattgcggtgggatctgtggacagtaatcgtgttcgatcctcgttttctaactatggatctgggcttgaagtgatggcaccgggcagcaacatctacagtacgtatcctaattccagatatacatctttgagtggtacaagcatggctactccgcacgttgcgggcgtagctgggctcattcgcgcagccaacccagacatagtggtcgcgcaagcccgtcagattctgcgggataccgcgcaagaagcaggatcgttcacacagtacggctatggaatcgtcgatgctcatgccgccgttgttgctgcatccggtggtagcggcggc

SEQ ID NO: 992 - protein, 413 aa, synthetic construct
  REGION 1..413: note = Variant of serine peptidase from Bacillus sinesaloumensis
MADQASQANGNQDVIEGELIVSVEPKNGKPDVSIQSAQSVTGQEDVLKSKGFTIVDTLHVEDSSVKPLVSKNFNKKVVEKMGLVYLVQYSPDQFKSSNIAKKELRKELMDLGFKVRYISENYKMMAIEGTATLQGVHPCQVWHYNMIKAPEAWAITSGSLSVKVAVLDTGIDHNHPSLANFVNTNLGRSFVGGNTMDVQGHGTHVAGTIASYGSVSGVMQSATLIPVKVLDNSGSGSLYGITQGILYAADIDADVINMSLGGGGYNQSQDEAVQTAVAQGTIVVAATGNDGASSISYPAAYSSVIAVGSVDSNRVRSSFSNYGSGLEVMAPGSNIYSTYPNSRYTSLSGTSMATPHVAGVAGLIRAANPDIVVAQARQILRDTAQEAGSFTQYGYGIVDAHAAVVAASGGSGG

SEQ ID NO: 993 - DNA, 1239 bp, synthetic construct
  misc_feature 1..1239: note = Variant of serine peptidase from Bacillus sinesaloumensis
  source 1..1239: mol_type = other DNA
atggcagatcaagctagtcaagctaatggaaaccaggacgtcattgaaggcgagctgatcgtttcagtggaaccgaagaacggtaaacctgatgtgagcattcaaagtgcacaatccgtaacagggcaggaagacgtccttaaatcgaaaggctttacgatcgttgataccttgcatgtagaggatagcagcgtcaagccactcgtctcgaagaatttcaataagaaagtggtggagaagatgggactggtgtatcttgttcaatactctccggaccagtttaaaagttccaacattgcgaagaaagaactcagaaaagaattgatggatctgggctttaaagtccgctatataagcgaaaattacaagatgatggcgatcgaaggtacagccactcttcagggggtgcaccctaaccaagtttggcattataatatgattaaagctccggaagcgtgggctattgtaggtggatccctgagcgttaaagtagcagtcctggatacagggatcgaccataatcacccatccttggccaacttcgtgaatactaatcttggccgctcgtttgttggaggaaacaccatggatgttcaaggtcatggcacacatgttgctggcacgattgcatcttatgggagtgtaagcggagtgatgcagagtgcgacactgatcccggtcaaagtgctcgataattctggcagcgggtccctttacggtattacgcagggcatattgtatgccgccgacatcgatgcggacgtcattaacatgtctctgggtgggggaggctataatcagagcatggatgaggctgttcaaacagcagttgctcagggaaccattgtagtagcagcgactggcaatgatggtgcatcgtcgatcagttatcctgctgcctacagcagcgtcattgcggtgggatctgtggactccaatcgtgttcgatcctcgttttctaactatggatctgggcttgaagtgatggcaccgggcagcaacatctacagtacgtatcctaatggcagatatacgactttgagtggtacaagcatggctactccgcacgttgcgggcgtagctgggctcattcgcgcagccaacccagacatagtggtcgcgcaagcccgtcagattctgcgggataccgcgcaagaagcaggatcgttcacacagtacggctatggaatcgtcgatgctcatgccgccgttgttgctgcatccggtggtagcggcggc

SEQ ID NO: 994 - protein, 413 aa, synthetic construct
  REGION 1..413: note = Variant of serine peptidase from Bacillus sinesaloumensis
MADQASQANGNQDVIEGELIVSVEPKNGKPDVSIQSAQSVTGQEDVLKSKGFTIVDTLHVEDSSVKPLVSKNFNKKVVEKMGLVYLVQYSPDQFKSSNIAKKELRKELMDLGFKVRYISENYKMMAIEGTATLQGVHPNQVWHYNMIKAPEAWAIVGGSLSVKVAVLDTGIDHNHPSLANFVNTNLGRSFVGGNTMDVQGHGTHVAGTIASYGSVSGVMQSATLIPVKVLDNSGSGSLYGITQGILYAADIDADVINMSLGGGGYNQSMDEAVQTAVAQGTIVVAATGNDGASSISYPAAYSSVIAVGSVDSNRVRSSFSNYGSGLEVMAPGSNIYSTYPNGRYTTLSGTSMATPHVAGVAGLIRAANPDIVVAQARQILRDTAQEAGSFTQYGYGIVDAHAAVVAASGGSGG

SEQ ID NO: 995 - DNA, 1239 bp, synthetic construct
  misc_feature 1..1239: note = Variant of serine peptidase from Bacillus sinesaloumensis
  source 1..1239: mol_type = other DNA
atggcagatcaagctagtcaagctaatggaaaccaggacgtcattgaaggcgagctgatcgtttcagtggaaccgaagaacggtaaacctgatgtgagcattcaaagtgcacaatccgtaacagggcaggaagacgtccttaaatcgaaaggctttacgatcgttgataccttgcatgtagaggatagcagcgtcaagccactcgtctcgaagaatttcaataagaaagtggtggagaagatgggactggtgtatcttgttcaatactctccggaccagtttaaaagttccaacattgcgaagaaagaactcagaaaagaattgatggatctgggctttaaagtccgctatataagcgaaaattacaagatgatggcgatcgaaggtacagccactcttcagggggtgcaccctctgcaagtttgggcgtataatatgattaaagctccggaagcgtgggctattacgtctggatccctgagcgttaaagtagcagtcctggatacagggatcgaccataatcacccatccttggccaacttcgtgaatactaatcttggccgctcgtttgttggaggaaacaccatggatgttcaaggtcatggcacacatgttgctggcacgattgcatcttatgggagtgtaagcggagtgatgcagagtgcgacactgatcccggtcaaagtgctcgataattctggcagcgggtccctttacggtattacgcaaggcatattgtatgccgccgacatcgatgcggacgtcattaacatgtctctgggtggaggaggctataatcagagcatggatgaggctgttcaaacagcagttgctcagggaaccattgtagtagcagcgactggcaatgatggtgcatcgtcgatcagttatcctgctgcctacagcagcgtcattgcggtgggatctgtggacagtaatcgtgttcgatcctcgttttctaactatggatctgggcttgaagttatggcaccgggcagcaacatctacagtacgtatcctaattccagatatacatctttgagtggtacaagcatggctactccgcacgttgcgggcgtagctgggctcattcgcgcagccaacccagacatagtggtcgcgcaagcccgtcagattctgcgggataccgcgcaagaagcaggatcgttcacacagtacggctatggaatcgtcgatgctcatgccgccgttgttgctgcatccggtggtagcggcggc

SEQ ID NO: 996 - protein, 413 aa, synthetic construct
  REGION 1..413: note = Variant of serine peptidase from Bacillus sinesaloumensis
MADQASQANGNQDVIEGELIVSVEPKNGKPDVSIQSAQSVTGQEDVLKSKGFTIVDTLHVEDSSVKPLVSKNFNKKVVEKMGLVYLVQYSPDQFKSSNIAKKELRKELMDLGFKVRYISENYKMMAIEGTATLQGVHPLQVWAYNMIKAPEAWAITSGSLSVKVAVLDTGIDHNHPSLANFVNTNLGRSFVGGNTMDVQGHGTHVAGTIASYGSVSGVMQSATLIPVKVLDNSGSGSLYGITQGILYAADIDADVINMSLGGGGYNQSMDEAVQTAVAQGTIVVAATGNDGASSISYPAAYSSVIAVGSVDSNRVRSSFSNYGSGLEVMAPGSNIYSTYPNSRYTSLSGTSMATPHVAGVAGLIRAANPDIVVAQARQILRDTAQEAGSFTQYGYGIVDAHAAVVAASGGSGG

SEQ ID NO: 997 - DNA, 1239 bp, synthetic construct
  misc_feature 1..1239: note = Variant of serine peptidase from Bacillus sinesaloumensis
  source 1..1239: mol_type = other DNA
atggcagatcaagctagtcaagctaatggaaaccaggacgtcattgaaggcgagctgatcgtttcagtggaaccgaagaacggtaaacctgatgtgagcattcaaagtgcacaatccgtaacagggcaggaagacgtccttaaatcgaaaggctttacgatcgttgataccttgcatgtagaggatagcagcgtcaagccactcgtctcgaagaatttcaataagaaagtggtggagaagatgggactggtgtatcttgttcaatactctccggaccagtttaaaagttccaacattgcgaagaaagaactcagaaaagaattgatggatctgggctttaaagtccgctatataagcgaaaattacaagatgatggcgatcgaaggtacagccactcttcagggggtgcaccctaaccaagtttggcattataatatgattaaagctccggaagcgtgggctattacgtctggatccctgagcgttaaagtagcagtcctggatacagggatcgaccataatcacccatccttggccaacttcgtgaatactaatcttggccgctcgtttgttggaggaaacaccatggatgttcaaggtcatggcacacatgttgctggcacgattgcatcttatgggagtgtaagcggagtgatgcagagtgcgacactgatcccggtcaaagtgctcgataattctggcagcgggtccctttacggtattacgcaaggcatattgtatgccgccgacatcgatgcggacgtcattaacatgtctctgggtggaggaggctataatcagagccaggatgaggctgttcaaacagcagttgctcagggaaccattgtagtagcagcgactggcaatgatggtgcatcgtcgatcagttatcctgctgcctacagcagcgtcattgcggtgggatctgtggactccaatcgtgttcgatcctcgttttctaactatggatctgggcttgaagttatggcaccgggcagcaacatctacagtacgtatcctaattccagatatacatctttgagtggtacaagcatggctactccgcacgttgcgggcgtagctgggctcattcgcgcagccaacccagacatagtggtcgcgcaagcccgtcagattctgcgggataccgcgcaagaagcaggatcgttcacacagtacggctatggaatcgtcgatgctcatgccgccgttgttgctgcatccggtggtagcggcggc

SEQ ID NO: 998 - protein, 413 aa, synthetic construct
  REGION 1..413: note = Variant of serine peptidase from Bacillus sinesaloumensis
MADQASQANGNQDVIEGELIVSVEPKNGKPDVSIQSAQSVTGQEDVLKSKGFTIVDTLHVEDSSVKPLVSKNFNKKVVEKMGLVYLVQYSPDQFKSSNIAKKELRKELMDLGFKVRYISENYKMMAIEGTATLQGVHPNQVWHYNMIKAPEAWAITSGSLSVKVAVLDTGIDHNHPSLANFVNTNLGRSFVGGNTMDVQGHGTHVAGTIASYGSVSGVMQSATLIPVKVLDNSGSGSLYGITQGILYAADIDADVINMSLGGGGYNQSQDEAVQTAVAQGTIVVAATGNDGASSISYPAAYSSVIAVGSVDSNRVRSSFSNYGSGLEVMAPGSNIYSTYPNSRYTSLSGTSMATPHVAGVAGLIRAANPDIVVAQARQILRDTAQEAGSFTQYGYGIVDAHAAVVAASGGSGG

SEQ ID NO: 999 - DNA, 1239 bp, synthetic construct
  misc_feature 1..1239: note = Variant of serine peptidase from Bacillus sinesaloumensis
  source 1..1239: mol_type = other DNA
atggcagatcaagctagtcaagctaatggaaaccaggacgtcattgaaggcgagctgatcgtttcagtggaaccgaagaacggtaaacctgatgtgagcattcaaagtgcacaatccgtaacagggcaggaagacgtccttaaatcgaaaggctttacgatcgttgataccttgcatgtagaggatagcagcgtcaagccactcgtctcgaagaatttcaataagaaagtggtggagaagatgggactggtgtatcttgttcaatactctccggaccagtttaaaagttccaacattgcgaagaaagaactcagaaaagaattgatggatctgggctttaaagtccgctatataagcgaaaattacaagatgatggcgatcgaaggtacagccactcttcagggggtgcaccctctgcaagtttggcattataatatgattaaagctccggaagcgtgggctattacgtctggatccctgagcgttaaagtagcagtcctggatacagggatcgaccataatcacccatccttggccaacttcgtgaatactaatcttggccgctcgtttgttggaggaaacaccatggatgttcaaggtcatggcacacatgttgctggcacgattgcatcttatgggagtgtaagcggagtgatgcagagtgcgacactgatcccggtcaaagtgctcgataattctggcagcgggtccctttacggtattacgctgggcatattgtatgccgccgacatcgatgcggacgtcattaacatgtctctgggtggaggaggctataatcagagcatggatgaggctgttcaaacagcagttgctcagggaaccattgtagtagcagcgactggcaatgatggtgcatcgtcgatcagttatcctgctgcctacagcagcgtcattgcggtgggatctgtggacagtaatcgtgttcgatcctcgttttctaactatggatctgggcttgaactgatggcaccgggcagcaacatctacagtacgtatcctaattccagatatacatctttgagtggtacaagcatggctactccgcacgttgcgggcgtagctgggctcattcgcgcagccaacccagacatagtggtcgcgcaagcccgtcagattctgcgggataccgcgcaagaagcaggatcgttcacacagtacggctatggaatcgtcgatgctcatgccgccgttgttgctgcatccggtggtagcggcggc

SEQ ID NO: 1000 - protein, 413 aa, synthetic construct
  REGION 1..413: note = Variant of serine peptidase from Bacillus sinesaloumensis
MADQASQANGNQDVIEGELIVSVEPKNGKPDVSIQSAQSVTGQEDVLKSKGFTIVDTLHVEDSSVKPLVSKNFNKKVVEKMGLVYLVQYSPDQFKSSNIAKKELRKELMDLGFKVRYISENYKMMAIEGTATLQGVHPLQVWHYNMIKAPEAWAITSGSLSVKVAVLDTGIDHNHPSLANFVNTNLGRSFVGGNTMDVQGHGTHVAGTIASYGSVSGVMQSATLIPVKVLDNSGSGSLYGITLGILYAADIDADVINMSLGGGGYNQSMDEAVQTAVAQGTIVVAATGNDGASSISYPAAYSSVIAVGSVDSNRVRSSFSNYGSGLELMAPGSNIYSTYPNSRYTSLSGTSMATPHVAGVAGLIRAANPDIVVAQARQILRDTAQEAGSFTQYGYGIVDAHAAVVAASGGSGG

SEQ ID NO: 1001 - DNA, 1239 bp, synthetic construct
  misc_feature 1..1239: note = Variant of serine peptidase from Bacillus sinesaloumensis
  source 1..1239: mol_type = other DNA
atggcagatcaagctagtcaagctaatggaaaccaggacgtcattgaaggcgagctgatcgtttcagtggaaccgaagaacggtaaacctgatgtgagcattcaaagtgcacaatccgtaacagggcaggaagacgtccttaaatcgaaaggctttacgatcgttgataccttgcatgtagaggatagcagcgtcaagccactcgtctcgaagaatttcaataagaaagtggtggagaagatgggactggtgtatcttgttcaatactctccggaccagtttaaaagttccaacattgcgaagaaagaactcagaaaagaattgatggatctgggctttaaagtccgctatataagcgaaaattacaagatgatggcgatcgaaggtacagccactcttcagggggtgcaccctaaccaagtttggcattataatatgattaaagctccggaagcgtgggctattacgtctggatccctgagcgttaaagtagcagtcctggatacagggatcgaccataatcacccatccttggccaacttcgtgaatactaatcttggccgctcgtttgttggaggaaacaccatggatgttcaaggtcatggcacacatgttgctggcacgattgcatcttatgggagtgtaagcggagtgatgcagagtgcgacactgatcccggtcaaagtgctcgataattctggcagcgggtccctttacggtattacgcaaggcatattgtatgccgccgacatcgatgcggacgtcattaacatgtctctgggtgggggaggctataatcagagccaggatgaggctgttcaaacagcagttgctcagggaaccattgtagtagcagcgactggcaatgatggtgcatcgtcgatcagttatcctgctgcctacagcagcgtcattgcggtgggatctgtggactccaatcgtgttcgatcctcgttttctaactatggatctgggcttgaactgatggcaccgggcagcaacatctacagtacgtatcctaatagcagatatacgagtttgagtggtacaagcatggctactccgcacgttgcgggcgtagctgggctcattcgcgcagccaacccagacatagtggtcgcgcaagcccgtcagattctgcgggataccgcgcaagaagcaggatcgttcacacagtacggctatggaatcgtcgatgctcatgccgccgttgttgctgcatccggtggtagcggcggc

SEQ ID NO: 1002 - protein, 413 aa, synthetic construct
  REGION 1..413: note = Variant of serine peptidase from Bacillus sinesaloumensis
MADQASQANGNQDVIEGELIVSVEPKNGKPDVSIQSAQSVTGQEDVLKSKGFTIVDTLHVEDSSVKPLVSKNFNKKVVEKMGLVYLVQYSPDQFKSSNIAKKELRKELMDLGFKVRYISENYKMMAIEGTATLQGVHPNQVWHYNMIKAPEAWAITSGSLSVKVAVLDTGIDHNHPSLANFVNTNLGRSFVGGNTMDVQGHGTHVAGTIASYGSVSGVMQSATLIPVKVLDNSGSGSLYGITQGILYAADIDADVINMSLGGGGYNQSQDEAVQTAVAQGTIVVAATGNDGASSISYPAAYSSVIAVGSVDSNRVRSSFSNYGSGLELMAPGSNIYSTYPNSRYTSLSGTSMATPHVAGVAGLIRAANPDIVVAQARQILRDTAQEAGSFTQYGYGIVDAHAAVVAASGGSGG

SEQ ID NO: 1003 - DNA, 1239 bp, synthetic construct
  misc_feature 1..1239: note = Variant of serine peptidase from Bacillus sinesaloumensis
  source 1..1239: mol_type = other DNA
atggcagatcaagctagtcaagctaatggaaaccaggacgtcattgaaggcgagctgatcgtttcagtggaaccgaagaacggtaaacctgatgtgagcattcaaagtgcacaatccgtaacagggcaggaagacgtccttaaatcgaaaggctttacgatcgttgataccttgcatgtagaggatagcagcgtcaagccactcgtctcgaagaatttcaataagaaagtggtggagaagatgggactggtgtatcttgttcaatactctccggaccagtttaaaagttccaacattgcgaagaaagaactcagaaaagaattgatggatctgggctttaaagtccgctatataagcgaaaattacaagatgatggcgatcgaaggtacagccactcttcagggggtgcaccctaaccaagtttgggcgtatgagatgattaaagctccggaagcgtgggctattacgtctggatccctgagcgttaaagtagcagtcctggatagcgggatcgaccataatcacccatccttggccaacttcgtgaatactaatcttggccgctcgtttgttggaggaaacaccatggatgttcaaggtcatggcacacatgttgctggcacgattgcatcttatgggagtgtaagcggagtgatgcagagtgcgacactgatcccggtcaaagtgctcgataattctggcagcgggtccctttacggtattacgcaaggcatattgtatgccgccgacatcgatgcggacgtcattaacatgtctctgggtgggggaggctataatcagagcatggatgaggctgttcaaacagcagttgctcagggaaccattgtagtagcagcgactggcaatgatggtgcatcgtcgatcagttatcctgctgcctacagcagcgtcattgcggtgggatctgtggactccaatcgtgttcgatcctcgttttctaactatggatctgggcttgaagttatggcaccgggcagcaacatctacagtacgtatcctaattccagatatacatctttgagtggtacaagcatggctactccgcacgttgcgggcgtagctgggctcattcgcgcagccaacccagacatagtggtcgcgcaagcccgtcagattctgcgggataccgcgcaagaagcaggatcgttcacacagtacggctatggaatcgtcgatgctcatgccgccgttgttgctgcatccggtggtagcggcggc

SEQ ID NO: 1004 - protein, 413 aa, synthetic construct
  REGION 1..413: note = Variant of serine peptidase from Bacillus sinesaloumensis
MADQASQANGNQDVIEGELIVSVEPKNGKPDVSIQSAQSVTGQEDVLKSKGFTIVDTLHVEDSSVKPLVSKNFNKKVVEKMGLVYLVQYSPDQFKSSNIAKKELRKELMDLGFKVRYISENYKMMAIEGTATLQGVHPNQVWAYEMIKAPEAWAITSGSLSVKVAVLDSGIDHNHPSLANFVNTNLGRSFVGGNTMDVQGHGTHVAGTIASYGSVSGVMQSATLIPVKVLDNSGSGSLYGITQGILYAADIDADVINMSLGGGGYNQSMDEAVQTAVAQGTIVVAATGNDGASSISYPAAYSSVIAVGSVDSNRVRSSFSNYGSGLEVMAPGSNIYSTYPNSRYTSLSGTSMATPHVAGVAGLIRAANPDIVVAQARQILRDTAQEAGSFTQYGYGIVDAHAAVVAASGGSGG

SEQ ID NO: 1005 - DNA, 1239 bp, synthetic construct
  misc_feature 1..1239: note = Variant of serine peptidase from Bacillus sinesaloumensis
  source 1..1239: mol_type = other DNA
atggcagatcaagctagtcaagctaatggaaaccaggacgtcattgaaggcgagctgatcgtttcagtggaaccgaagaacggtaaacctgatgtgagcattcaaagtgcacaatccgtaacagggcaggaagacgtccttaaatcgaaaggctttacgatcgttgataccttgcatgtagaggatagcagcgtcaagccactcgtctcgaagaatttcaataagaaagtggtggagaagatgggactggtgtatcttgttcaatactctccggaccagtttaaaagttccaacattgcgaagaaagaactcagaaaagaattgatggatctgggctttaaagtccgctatataagcgaaaattacaagatgatggcgatcgaaggtacagccactcttcagggggtgcaccctaaccaagtttggcattataatatgattaaagctccggaagcgtgggctattacgtctggatccctgagcgttaaagtagcagtcctggatacagggatcgaccataatcacccatccttggccaacttcgtgaatactaatcttggccgctcgtttgttggaggaaacaccatggatgttcaaggtcatggcacacatgttgctggcacgattgcatcttatgggagtgtaagcggagtgatgcagagtgcgacactgatcccggtcaaagtgctcgataattctggcagcgggtccctttacggtattacgcaaggcatattgtatgccgccgacatcgatgcggacgtcattaacatgtctctgggtggaggaggctataatcagagcatggatgaggctgttcaaacagcagttgctcagggaaccattgtagtagcagcgactggcaatgatggtgcatcgtcgatcagttatcctgctgcctacagcagcgtcattgcggtgggatctgtggactccaatcgtgttcgatcctcgttttctaactatggatctgggcttgaactgatggcaccgggcagcaacatctacagtacgtatcctaattccagatatacatctttgagtggtacaagcatggctactccgcacgttgcgggcgtagctgggctcattcgcgcagccaacccagacatagtggtcgcgcaagcccgtcagattctgcgggataccgcgcaagaagcaggatcgttcacacagtacggctatggaatcgtcgatgctcatgccgccgttgttgctgcatccggtggtagcggcggc

SEQ ID NO: 1006 - protein, 413 aa, synthetic construct
  REGION 1..413: note = Variant of serine peptidase from Bacillus sinesaloumensis
MADQASQANGNQDVIEGELIVSVEPKNGKPDVSIQSAQSVTGQEDVLKSKGFTIVDTLHVEDSSVKPLVSKNFNKKVVEKMGLVYLVQYSPDQFKSSNIAKKELRKELMDLGFKVRYISENYKMMAIEGTATLQGVHPNQVWHYNMIKAPEAWAITSGSLSVKVAVLDTGIDHNHPSLANFVNTNLGRSFVGGNTMDVQGHGTHVAGTIASYGSVSGVMQSATLIPVKVLDNSGSGSLYGITQGILYAADIDADVINMSLGGGGYNQSMDEAVQTAVAQGTIVVAATGNDGASSISYPAAYSSVIAVGSVDSNRVRSSFSNYGSGLELMAPGSNIYSTYPNSRYTSLSGTSMATPHVAGVAGLIRAANPDIVVAQARQILRDTAQEAGSFTQYGYGIVDAHAAVVAASGGSGG

SEQ ID NO: 1007 - DNA, 1239 bp, synthetic construct
  misc_feature 1..1239: note = Variant of serine peptidase from Bacillus sinesaloumensis
  source 1..1239: mol_type = other DNA
atggcagatcaagctagtcaagctaatggaaaccaggacgtcattgaaggcgagctgatcgtttcagtggaaccgaagaacggtaaacctgatgtgagcattcaaagtgcacaatccgtaacagggcaggaagacgtccttaaatcgaaaggctttacgatcgttgataccttgcatgtagaggatagcagcgtcaagccactcgtctcgaagaatttcaataagaaagtggtggagaagatgggactggtgtatcttgttcaatactctccggaccagtttaaaagttccaacattgcgaagaaagaactcagaaaagaattgatggatctgggctttaaagtccgctatataagcgaaaattacaagatgatggcgatcgaaggtacagccactcttcagggggtgcaccctaaccaagtttgggcgtatgagatgattaaagctccggaagcgtgggctattacgtctggatccctgagcgttaaagtagcagtcctggatacagggatcgaccataatcacccatccttggccaacttcgtgaatactaatcttggccgctcgtttgttggaggaaacaccatggatgttcaaggtcatggcacacatgttgctggcacgattgcatcttatgggagtgtaagcggagtgatgcagagtgcgacactgatcccggtcaaagtgctcgataattctggcagcgggtccctttacggtattacgcaaggcatattgtatgccgccgacatcgatgcggacgtcattaacatgtctctgggtagcggaggctataatcagagcatggatgaggctgttcaaacagcagttgctcagggaaccattgtagtagcagcgactggcaatgatggtgcatcgtcgatcagttatcctgctgcctacagcagcgtcattgcggtgggatctgtggactccaatcgtgttcgatcctcgttttctaactatggatctgggcttgaagttatggcaccgggcagcaacatctacagtacgtatcctaattccagatatacatctttgagtggtacaagcatggctactccgcacgttgcgggcgtagctgggctcattcgcgcagccaacccagacatagtggtcgcgcaagcccgtcagattctgcgggataccgcgcaagaagcaggatcgttcacacagtacggctatggaatcgtcgatgctcatgccgccgttgttgctgcatccggtggtagcggcggc

SEQ ID NO: 1008 - protein, 413 aa, synthetic construct
  REGION 1..413: note = Variant of serine peptidase from Bacillus sinesaloumensis
MADQASQANGNQDVIEGELIVSVEPKNGKPDVSIQSAQSVTGQEDVLKSKGFTIVDTLHVEDSSVKPLVSKNFNKKVVEKMGLVYLVQYSPDQFKSSNIAKKELRKELMDLGFKVRYISENYKMMAIEGTATLQGVHPNQVWAYEMIKAPEAWAITSGSLSVKVAVLDTGIDHNHPSLANFVNTNLGRSFVGGNTMDVQGHGTHVAGTIASYGSVSGVMQSATLIPVKVLDNSGSGSLYGITQGILYAADIDADVINMSLGSGGYNQSMDEAVQTAVAQGTIVVAATGNDGASSISYPAAYSSVIAVGSVDSNRVRSSFSNYGSGLEVMAPGSNIYSTYPNSRYTSLSGTSMATPHVAGVAGLIRAANPDIVVAQARQILRDTAQEAGSFTQYGYGIVDAHAAVVAASGGSGG

SEQ ID NO: 1009 - DNA, 1239 bp, synthetic construct
  misc_feature 1..1239: note = Variant of serine peptidase from Bacillus sinesaloumensis
  source 1..1239: mol_type = other DNA
atggcagatcaagctagtcaagctaatggaaaccaggacgtcattgaaggcgagctgatcgtttcagtggaaccgaagaacggtaaacctgatgtgagcattcaaagtgcacaatccgtaacagggcaggaagacgtccttaaatcgaaaggctttacgatcgttgataccttgcatgtagaggatagcagcgtcaagccactcgtctcgaagaatttcaataagaaagtggtggagaagatgggactggtgtatcttgttcaatactctccggaccagtttaaaagttccaacattgcgaagaaagaactcagaaaagaattgatggatctgggctttaaagtccgctatataagcgaaaattacaagatgatggcgatcgaaggtacagccactcttcagggggtgcaccctaaccaagtttggcattatgagatgattaaagctccggaagcgtgggctattacgtctggatccctgagcgttaaagtagcagtcctggatacagggatcgaccataatcacccatccttggccaacttcgtgaatactaatcttggccgctcgtttgttggaggaaacaccatggatgttcaaggtcatggcacacatgttgctggcacgattgcatcttatgggagtgtaagcggagtgatgcagagtgcgacactgatcccggtcaaagtgctcgataattctggcagcgggtccctttacggtattacgcaaggcatattgtatgccgccgacatcgatgcggacgtcattaacatgtctctgggtagcggaggctataatcagagcatggatgaggctgttcaaacagcagttgctcagggaaccattgtagtagcagcgactggcaatgatggtgcatcgtcgatcagttatcctgctgcctacagcagcgtcattgcggtgggatctgtggacattaatcgtgttcgatcctcgttttctaactatggatctgggcttgaactgatggcaccgggcagcaacatctacagtacgtatcctaattccagatatacatctttgagtggtacaagcatggctactccgcacgttgcgggcgtagctgggctcattcgcgcagccaacccagacatagtggtcgcgcaagcccgtcagattctgcgggataccgcgcaagaagcaggatcgttcacacagtacggctatggaatcgtcgatgctcatgccgccgttgttgctgcatccggtggtagcggcggc

SEQ ID NO: 1010 - protein, 413 aa, synthetic construct
  REGION 1..413: note = Variant of serine peptidase from Bacillus sinesaloumensis
MADQASQANGNQDVIEGELIVSVEPKNGKPDVSIQSAQSVTGQEDVLKSKGFTIVDTLHVEDSSVKPLVSKNFNKKVVEKMGLVYLVQYSPDQFKSSNIAKKELRKELMDLGFKVRYISENYKMMAIEGTATLQGVHPNQVWHYEMIKAPEAWAITSGSLSVKVAVLDTGIDHNHPSLANFVNTNLGRSFVGGNTMDVQGHGTHVAGTIASYGSVSGVMQSATLIPVKVLDNSGSGSLYGITQGILYAADIDADVINMSLGSGGYNQSMDEAVQTAVAQGTIVVAATGNDGASSISYPAAYSSVIAVGSVDINRVRSSFSNYGSGLELMAPGSNIYSTYPNSRYTSLSGTSMATPHVAGVAGLIRAANPDIVVAQARQILRDTAQEAGSFTQYGYGIVDAHAAVVAASGGSGG

SEQ ID NO: 1011 - DNA, 1239 bp, synthetic construct
  misc_feature 1..1239: note = Variant of serine peptidase from Bacillus sinesaloumensis
  source 1..1239: mol_type = other DNA
atggcagatcaagctagtcaagctaatggaaaccaggacgtcattgaaggcgagctgatcgtttcagtggaaccgaagaacggtaaacctgatgtgagcattcaaagtgcacaatccgtaacagggcaggaagacgtccttaaatcgaaaggctttacgatcgttgataccttgcatgtagaggatagcagcgtcaagccactcgtctcgaagaatttcaataagaaagtggtggagaagatgggactggtgtatcttgttcaatactctccggaccagtttaaaagttccaacattgcgaagaaagaactcagaaaagaattgatggatctgggctttaaagtccgctatataagcgaaaattacaagatgatggcgatcgaaggtacagccactcttcagggggtgcaccctctgcaagtttggcattataatatgattaaagctccggaagcgtgggctattgtaggtggatccctgagcgttaaagtagcagtcctggatacagggatcgaccataatcacccatccttggccaacttcgtgaatactaatcttggccgctcgtttgttggaggaaacaccatggatgttcaaggtcatggcacacatgttgctggcacgattgcatcttatgggagtgtaagcggagtgatgcagagtgcgacactgatcccggtcaaagtgctcgataattctggcagcgggtccctttacggtattacgcaaggcatattgtatgccgccgacatcgatgcggacgtcattaacatgtctctgggtggaggaggctataatcagagcatggatgaggctgttcaaacagcagttgctcagggaaccattgtagtagcagcgactggcaatgatggtgcatcgtcgatcagttatcctgctgcctacagcagcgtcattgcggtgggatctgtggactccaatcgtgttcgatcctcgttttctaactatggatctgggcttgaagttatggcaccgggcagcaacatctacagtacgtatcctaattccagatatacatctttgagtggtacaagcatggctactccgcacgttgcgggcgtagctgggctcattcgcgcagccaacccagacatagtggtcgcgcaagcccgtcagattctgcgggataccgcgcaagaagcaggatcgttcacacagtacggctatggaatcgtcgatgctcatgccgccgttgttgctgcatccggtggtagcggcggc

SEQ ID NO: 1012 - protein, 413 aa, synthetic construct
  REGION 1..413: note = Variant of serine peptidase from Bacillus sinesaloumensis
MADQASQANGNQDVIEGELIVSVEPKNGKPDVSIQSAQSVTGQEDVLKSKGFTIVDTLHVEDSSVKPLVSKNFNKKVVEKMGLVYLVQYSPDQFKSSNIAKKELRKELMDLGFKVRYISENYKMMAIEGTATLQGVHPLQVWHYNMIKAPEAWAIVGGSLSVKVAVLDTGIDHNHPSLANFVNTNLGRSFVGGNTMDVQGHGTHVAGTIASYGSVSGVMQSATLIPVKVLDNSGSGSLYGITQGILYAADIDADVINMSLGGGGYNQSMDEAVQTAVAQGTIVVAATGNDGASSISYPAAYSSVIAVGSVDSNRVRSSFSNYGSGLEVMAPGSNIYSTYPNSRYTSLSGTSMATPHVAGVAGLIRAANPDIVVAQARQILRDTAQEAGSFTQYGYGIVDAHAAVVAASGGSGG

SEQ ID NO: 1013 - DNA, 1239 bp, synthetic construct
  misc_feature 1..1239: note = Variant of serine peptidase from Bacillus sinesaloumensis
  source 1..1239: mol_type = other DNA
atggcagatcaagctagtcaagctaatggaaaccaggacgtcattgaaggcgagctgatcgtttcagtggaaccgaagaacggtaaacctgatgtgagcattcaaagtgcacaatccgtaacagggcaggaagacgtccttaaatcgaaaggctttacgatcgttgataccttgcatgtagaggatagcagcgtcaagccactcgtctcgaagaatttcaataagaaagtggtggagaagatgggactggtgtatcttgttcaatactctccggaccagtttaaaagttccaacattgcgaagaaagaactcagaaaagaattgatggatctgggctttaaagtccgctatataagcgaaaattacaagatgatggcgatcgaaggtacagccactcttcagggggtgcacccttgtcaagtttggcattatgagatgattaaagctccggaagcgtgggctattacgtctggatccctgagcgttaaagtagcagtcctggatacagggatcgaccataatcacccatccttggccaacttcgtgaatactaatcttggccgctcgtttgttggaggaaacaccatggatgttcaaggtcatggcacacatgttgctggcacgattgcatcttatgggagtgtaagcggagtgatgcagagtgcgacactgatcccggtcaaagtgctcgataattctggcagcgggtccctttacggtattacgcagggcatattgtatgccgccgacatcgatgcggacgtcattaacatgtctctgggtgggggaggctataatcagagcatggatgaggctgttcaaacagcagttgctcagggaaccattgtagtagcagcgactggcaatgatggtgcatcgtcgatcagttatcctgctgcctacagcagcgtcattgcggtgggatctgtggacattaatcgtgttcgatcctcgttttctaactatggatctgggcttgaagtgatggcaccgggcagcaacatctacagtacgtatcctaattccagatatacatctttgagtggtacaagcatggctactccgcacgttgcgggcgtagctgggctcattcgcgcagccaacccagacatagtggtcgcgcaagcccgtcagattctgcgggataccgcgcaagaagcaggatcgttcacacagtacggctatggaatcgtcgatgctcatgccgccgttgttgctgcatccggtggtagcggcggc

SEQ ID NO: 1014 - protein, 413 aa, synthetic construct
  REGION 1..413: note = Variant of serine peptidase from Bacillus sinesaloumensis
MADQASQANGNQDVIEGELIVSVEPKNGKPDVSIQSAQSVTGQEDVLKSKGFTIVDTLHVEDSSVKPLVSKNFNKKVVEKMGLVYLVQYSPDQFKSSNIAKKELRKELMDLGFKVRYISENYKMMAIEGTATLQGVHPCQVWHYEMIKAPEAWAITSGSLSVKVAVLDTGIDHNHPSLANFVNTNLGRSFVGGNTMDVQGHGTHVAGTIASYGSVSGVMQSATLIPVKVLDNSGSGSLYGITQGILYAADIDADVINMSLGGGGYNQSMDEAVQTAVAQGTIVVAATGNDGASSISYPAAYSSVIAVGSVDINRVRSSFSNYGSGLEVMAPGSNIYSTYPNSRYTSLSGTSMATPHVAGVAGLIRAANPDIVVAQARQILRDTAQEAGSFTQYGYGIVDAHAAVVAASGGSGG

SEQ ID NO: 1015 - DNA, 1239 bp, synthetic construct
  misc_feature 1..1239: note = Variant of serine peptidase from Bacillus sinesaloumensis
  source 1..1239: mol_type = other DNA
atggcagatcaagctagtcaagctaatggaaaccaggacgtcattgaaggcgagctgatcgtttcagtggaaccgaagaacggtaaacctgatgtgagcattcaaagtgcacaatccgtaacagggcaggaagacgtccttaaatcgaaaggctttacgatcgttgataccttgcatgtagaggatagcagcgtcaagccactcgtctcgaagaatttcaataagaaagtggtggagaagatgggactggtgtatcttgttcaatactctccggaccagtttaaaagttccaacattgcgaagaaagaactcagaaaagaattgatggatctgggctttaaagtccgctatataagcgaaaattacaagatgatggcgatcgaaggtacagccactcttcagggggtgcaccctaaccaagtttggcattataatatgattaaagctccggaagcgtgggctattacgtctggatccctgagcgttaaagtagcagtcctggatacagggatcgaccataatcacccatccttggccaacttcgtgaatactaatcttggccgctcgtttgttggaggaaacaccatggatgttcaaggtcatggcacacatgttgctggcacgattgcatcttatgggagtgtaagcggagtgatgcagagtgcgacactgatcccggtcaaagtgctcgataattctggcagcgggtccctttacggtattacgcaaggcatattgtatgccgccgacatcgatgcggacgtcattaacatgtctctgggtggaggaggctataatcagagcatggatgaggctgttcaaacagcagttgctcagggaaccattgtagtagcagcgactggcaatgatggtgcatcgtcgatcagttatcctgctgcctacagcagcgtcattgcggtgggatctgtggacattaatcgtgttcgatcctcgttttctaactatggatctgggcttgaagttatggcaccgggcagcaacatctacagtacgtatcctaattccagatatacatctttgagtggtacaagcatggctactccgcacgttgcgggcgtagctgggctcattcgcgcagccaacccagacatagtggtcgcgcaagcccgtcagattctgcgggataccgcgcaagaagcaggatcgttcacacagtacggctatggaatcgtcgatgctcatgccgccgttgttgctgcatccggtggtagcggcggc

SEQ ID NO: 1016 - protein, 413 aa, synthetic construct
  REGION 1..413: note = Variant of serine peptidase from Bacillus sinesaloumensis
MADQASQANGNQDVIEGELIVSVEPKNGKPDVSIQSAQSVTGQEDVLKSKGFTIVDTLHVEDSSVKPLVSKNFNKKVVEKMGLVYLVQYSPDQFKSSNIAKKELRKELMDLGFKVRYISENYKMMAIEGTATLQGVHPNQVWHYNMIKAPEAWAITSGSLSVKVAVLDTGIDHNHPSLANFVNTNLGRSFVGGNTMDVQGHGTHVAGTIASYGSVSGVMQSATLIPVKVLDNSGSGSLYGITQGILYAADIDADVINMSLGGGGYNQSMDEAVQTAVAQGTIVVAATGNDGASSISYPAAYSSVIAVGSVDINRVRSSFSNYGSGLEVMAPGSNIYSTYPNSRYTSLSGTSMATPHVAGVAGLIRAANPDIVVAQARQILRDTAQEAGSFTQYGYGIVDAHAAVVAASGGSGG

SEQ ID NO: 1017 - DNA, 1239 bp, synthetic construct
  misc_feature 1..1239: note = Variant of serine peptidase from Bacillus sinesaloumensis
  source 1..1239: mol_type = other DNA
atggcagatcaagctagtcaagctaatggaaaccaggacgtcattgaaggcgagctgatcgtttcagtggaaccgaagaacggtaaacctgatgtgagcattcaaagtgcacaatccgtaacagggcaggaagacgtccttaaatcgaaaggctttacgatcgttgataccttgcatgtagaggatagcagcgtcaagccactcgtctcgaagaatttcaataagaaagtggtggagaagatgggactggtgtatcttgttcaatactctccggaccagtttaaaagttccaacattgcgaagaaagaactcagaaaagaattgatggatctgggctttaaagtccgctatataagcgaaaattacaagatgatggcgatcgaaggtacagccactcttcagggggtgcacccttgtcaagtttggcattataatatgattaaagctccggaagcgtgggctattacgtctggatccctgagcgttaaagtagcagtcctggatacagggatcgaccataatcacccatccttggccaacttcgtgaatactaatcttggccgctcgtttgttggaggaaacaccatggatgttcaaggtcatggcacacatgttgctggcacgattgcatcttatgggagtgtaagcggagtgatgcagagtgcgacactgatcccggtcaaagtgctcgataattctggcagcgggtccctttacggtattacgcaaggcatattgtatgccgccgacatcgatgcggacgtcattaacatgtctctgggtggaggaggctataatcagagcatggatgaggctgttcaaacagcagttgctcagggaaccattgtagtagcagcgactggcaatgatggtgcatcgtcgatcagttatcctgctgcctacagcagcgtcattgcggtgggatctgtggactccaatcgtgttcgatcctcgttttctaactatggatctgggcttgaagttatggcaccgggcagcaacatctacagtacgtatcctaattccagatatacatctttgagtggtacaagcatggctactccgcacgttgcgggcgtagctgggctcattcgcgcagccaacccagacatagtggtcgcgcaagcccgtcagattctgcgggataccgcgcaagaagcaggatcgttcacacagtacggctatggaatcgtcgatgctcatgccgccgttgttgctgcatccggtggtagcggcggc

SEQ ID NO: 1018 - protein, 413 aa, synthetic construct
  REGION 1..413: note = Variant of serine peptidase from Bacillus sinesaloumensis
MADQASQANGNQDVIEGELIVSVEPKNGKPDVSIQSAQSVTGQEDVLKSKGFTIVDTLHVEDSSVKPLVSKNFNKKVVEKMGLVYLVQYSPDQFKSSNIAKKELRKELMDLGFKVRYISENYKMMAIEGTATLQGVHPCQVWHYNMIKAPEAWAITSGSLSVKVAVLDTGIDHNHPSLANFVNTNLGRSFVGGNTMDVQGHGTHVAGTIASYGSVSGVMQSATLIPVKVLDNSGSGSLYGITQGILYAADIDADVINMSLGGGGYNQSMDEAVQTAVAQGTIVVAATGNDGASSISYPAAYSSVIAVGSVDSNRVRSSFSNYGSGLEVMAPGSNIYSTYPNSRYTSLSGTSMATPHVAGVAGLIRAANPDIVVAQARQILRDTAQEAGSFTQYGYGIVDAHAAVVAASGGSGG

SEQ ID NO: 1019 - DNA, 1239 bp, synthetic construct
  misc_feature 1..1239: note = Variant of serine peptidase from Bacillus sinesaloumensis
  source 1..1239: mol_type = other DNA
atggcagatcaagctagtcaagctaatggaaaccaggacgtcattgaaggcgagctgatcgtttcagtggaaccgaagaacggtaaacctgatgtgagcattcaaagtgcacaatccgtaacagggcaggaagacgtccttaaatcgaaaggctttacgatcgttgataccttgcatgtagaggatagcagcgtcaagccactcgtctcgaagaatttcaataagaaagtggtggagaagatgggactggtgtatcttgttcaatactctccggaccagtttaaaagttccaacattgcgaagaaagaactcagaaaagaattgatggatctgggctttaaagtccgctatataagcgaaaattacaagatgatggcgatcgaaggtacagccactcttcagggggtgcacccttgtcaagtttggcattataatatgattaaagctccggaagcgtgggctattacgtctggatccctgagcgttaaagtagcagtcctggatacagggatcgaccataatcacccatccttggccaacttcgtgaatactaatcttggccgctcgtttgttggaggaaacaccatggatgttcaaggtcatggcacacatgttgctggcacgattgcatcttatgggagtgtaagcggagtgatgcagagtgcgacactgatcccggtcaaagtgctcgataattctggcagcgggtccctttacggtattacgcaaggcatattgtatgccgccgacatcgatgcggacgtcattaacatgtctctgggtggaggaggctataatcagagcatggatgaggctgttcaaacagcagttgctcagggaaccattgtagtagcagcgactggcaatgatggtgcatcgtcgatcagttatcctgctgcctacagcagcgtcattgcggtgggatctgtggacattaatcgtgttcgatcctcgttttctaactatggatctgggcttgaagtgatggcaccgggcagcaacatctacagtacgtatcctaattccagatatacatctttgagtggtacaagcatggctactccgcacgttgcgggcgtagctgggctcattcgcgcagccaacccagacatagtggtcgcgcaagcccgtcagattctgcgggataccgcgcaagaagcaggatcgttcacacagtacggctatggaatcgtcgatgctcatgccgccgttgttgctgcatccggtggtagcggcggc

SEQ ID NO: 1020 - protein, 413 aa, synthetic construct
  REGION 1..413: note = Variant of serine peptidase from Bacillus sinesaloumensis
MADQASQANGNQDVIEGELIVSVEPKNGKPDVSIQSAQSVTGQEDVLKSKGFTIVDTLHVEDSSVKPLVSKNFNKKVVEKMGLVYLVQYSPDQFKSSNIAKKELRKELMDLGFKVRYISENYKMMAIEGTATLQGVHPCQVWHYNMIKAPEAWAITSGSLSVKVAVLDTGIDHNHPSLANFVNTNLGRSFVGGNTMDVQGHGTHVAGTIASYGSVSGVMQSATLIPVKVLDNSGSGSLYGITQGILYAADIDADVINMSLGGGGYNQSMDEAVQTAVAQGTIVVAATGNDGASSISYPAAYSSVIAVGSVDINRVRSSFSNYGSGLEVMAPGSNIYSTYPNSRYTSLSGTSMATPHVAGVAGLIRAANPDIVVAQARQILRDTAQEAGSFTQYGYGIVDAHAAVVAASGGSGG

SEQ ID NO: 1021 - DNA, 1239 bp, synthetic construct
  misc_feature 1..1239: note = Variant of serine peptidase from Bacillus sinesaloumensis
  source 1..1239: mol_type = other DNA
atggcagatcaagctagtcaagctaatggaaaccaggacgtcattgaaggcgagctgatcgtttcagtggaaccgaagaacggtaaacctgatgtgagcattcaaagtgcacaatccgtaacagggcaggaagacgtccttaaatcgaaaggctttacgatcgttgataccttgcatgtagaggatagcagcgtcaagccactcgtctcgaagaatttcaataagaaagtggtggagaagatgggactggtgtatcttgttcaatactctccggaccagtttaaaagttccaacattgcgaagaaagaactcagaaaagaattgatggatctgggctttaaagtccgctatataagcgaaaattacaagatgatggcgatcgaaggtacagccactcttcagggggtgcacccttgtcaagtttggcattataatatgattaaagctccggaagcgtgggctattgtaagtggatccctgagcgttaaagtagcagtcctggatacagggatcgaccataatcacccatccttggccaacttcgtgaatactaatcttggccgctcgtttgttggaggaaacaccatggatgttcaaggtcatggcacacatgttgctggcacgattgcatcttatgggagtgtaagcggagtgatgcagagtgcgacactgatcccggtcaaagtgctcgataattctggcagcgggtccctttacggtattacgcaaggcatattgtatgccgccgacatcgatgcggacgtcattaacatgtctctgggtggaggaggctataatcagagcatggatgaggctgttcaaacagcagttgctcagggaaccattgtagtagcagcgactggcaatgatggtgcatcgtcgatcagttatcctgctgcctacagcagcgtcattgcggtgggatctgtggacagtaatcgtgttcgatcctcgttttctaactatggatctgggcttgaagttatggcaccgggcagcaacatctacagtacgtatcctaattccagatatacatctttgagtggtacaagcatggctactccgcacgttgcgggcgtagctgggctcattcgcgcagccaacccagacatagtggtcgcgcaagcccgtcagattctgcgggataccgcgcaagaagcaggatcgttcacacagtacggctatggaatcgtcgatgctcatgccgccgttgttgctgcatccggtggtagcggcggc

SEQ ID NO: 1022 - protein, 413 aa, synthetic construct
  REGION 1..413: note = Variant of serine peptidase from Bacillus sinesaloumensis
MADQASQANGNQDVIEGELIVSVEPKNGKPDVSIQSAQSVTGQEDVLKSKGFTIVDTLHVEDSSVKPLVSKNFNKKVVEKMGLVYLVQYSPDQFKSSNIAKKELRKELMDLGFKVRYISENYKMMAIEGTATLQGVHPCQVWHYNMIKAPEAWAIVSGSLSVKVAVLDTGIDHNHPSLANFVNTNLGRSFVGGNTMDVQGHGTHVAGTIASYGSVSGVMQSATLIPVKVLDNSGSGSLYGITQGILYAADIDADVINMSLGGGGYNQSMDEAVQTAVAQGTIVVAATGNDGASSISYPAAYSSVIAVGSVDSNRVRSSFSNYGSGLEVMAPGSNIYSTYPNSRYTSLSGTSMATPHVAGVAGLIRAANPDIVVAQARQILRDTAQEAGSFTQYGYGIVDAHAAVVAASGGSGG

SEQ ID NO: 1023 - DNA, 1239 bp, synthetic construct
  misc_feature 1..1239: note = Variant of serine peptidase from Bacillus sinesaloumensis
  source 1..1239: mol_type = other DNA
atggcagatcaagctagtcaagctaatggaaaccaggacgtcattgaaggcgagctgatcgtttcagtggaaccgaagaacggtaaacctgatgtgagcattcaaagtgcacaatccgtaacagggcaggaagacgtccttaaatcgaaaggctttacgatcgttgataccttgcatgtagaggatagcagcgtcaagccactcgtctcgaagaatttcaataagaaagtggtggagaagatgggactggtgtatcttgttcaatactctccggaccagtttaaaagttccaacattgcgaagaaagaactcagaaaagaattgatggatctgggctttaaagtccgctatataagcgaaaattacaagatgatggcgatcgaaggtacagccactcttcagggggtgcacccttgtcaagtttgggcgtatgagatgattaaagctccggaagcgtgggctattacgtctggatccctgagcgttaaagtagcagtcctggatacagggatcgaccataatcacccatccttggccaacttcgtgaatactaatcttggccgctcgtttgttggaggaaacaccatggatgttcaaggtcatggcacacatgttgctggcacgattgcatcttatgggagtgtaagcggagtgatgcagagtgcgacactgatcccggtcaaagtgctcgataattctggcagcgggtccctttacggtattacgctgggcatattgtatgccgccgacatcgatgcggacgtcattaacatgtctctgggtgggggaggctataatcagagcatggatgaggctgttcaaacagcagttgctcagggaaccattgtagtagcagcgactggcaatgatggtgcatcgtcgatcagttatcctgctgcctacagcagcgtcattgcggtgggatctgtggacagtaatcgtgttcgatcctcgttttctaactatggatctgggcttgaagttatggcaccgggcagcaacatctacagtacgtatcctaattccagatatacatctttgagtggtacaagcatggctactccgcacgttgcgggcgtagctgggctcattcgcgcagccaacccagacatagtggtcgcgcaagcccgtcagattctgcgggataccgcgcaagaagcaggatcgttcacacagtacggctatggaatcgtcgatgctcatgccgccgttgttgctgcatccggtggtagcggcggc

SEQ ID NO: 1024 - protein, 413 aa, synthetic construct
  REGION 1..413: note = Variant of serine peptidase from Bacillus sinesaloumensis
MADQASQANGNQDVIEGELIVSVEPKNGKPDVSIQSAQSVTGQEDVLKSKGFTIVDTLHVEDSSVKPLVSKNFNKKVVEKMGLVYLVQYSPDQFKSSNIAKKELRKELMDLGFKVRYISENYKMMAIEGTATLQGVHPCQVWAYEMIKAPEAWAITSGSLSVKVAVLDTGIDHNHPSLANFVNTNLGRSFVGGNTMDVQGHGTHVAGTIASYGSVSGVMQSATLIPVKVLDNSGSGSLYGITLGILYAADIDADVINMSLGGGGYNQSMDEAVQTAVAQGTIVVAATGNDGASSISYPAAYSSVIAVGSVDSNRVRSSFSNYGSGLEVMAPGSNIYSTYPNSRYTSLSGTSMATPHVAGVAGLIRAANPDIVVAQARQILRDTAQEAGSFTQYGYGIVDAHAAVVAASGGSGG

SEQ ID NO: 1025 - DNA, 1239 bp, synthetic construct
  misc_feature 1..1239: note = Variant of serine peptidase from Bacillus sinesaloumensis
  source 1..1239: mol_type = other DNA
atggcagatcaagctagtcaagctaatggaaaccaggacgtcattgaaggcgagctgatcgtttcagtggaaccgaagaacggtaaacctgatgtgagcattcaaagtgcacaatccgtaacagggcaggaagacgtccttaaatcgaaaggctttacgatcgttgataccttgcatgtagaggatagcagcgtcaagccactcgtctcgaagaatttcaataagaaagtggtggagaagatgggactggtgtatcttgttcaatactctccggaccagtttaaaagttccaacattgcgaagaaagaactcagaaaagaattgatggatctgggctttaaagtccgctatataagcgaaaattacaagatgatggcgatcgaaggtacagccactcttcagggggtgcaccctaaccaagtttggcattatgagatgattaaagctccggaagcgtgggctattacgggtggatccctgagcgttaaagtagcagtcctggatacagggatcgaccataatcacccatccttggccaacttcgtgaatactaatcttggccgctcgtttgttggaggaaacaccatggatgttcaaggtcatggcacacatgttgctggcacgattgcatcttatgggagtgtaagcggagtgatgcagagtgcgacactgatcccggtcaaagtgctcgataattctggcagcgggtccctttacggtattacgcaaggcatattgtatgccgccgacatcgatgcggacgtcattaacatgtctctgggtgggggaggctataatcagagcatggatgaggctgttcaaacagcagttgctcagggaaccattgtagtagcagcgactggcaatgatggtgcatcgtcgatcagttatcctgctgcctacagcagcgtcattgcggtgggatctgtggactccaatcgtgttcgatcctcgttttctaactatggatctgggcttgaagttatggcaccgggcagcaacatctacagtacgtatcctaattccagatatacatctttgagtggtacaagcatggctactccgcacgttgcgggcgtagctgggctcattcgcgcagccaacccagacatagtggtcgcgcaagcccgtcagattctgcgggataccgcgcaagaagcaggatcgttcacacagtacggctatggaatcgtcgatgctcatgccgccgttgttgctgcatccggtggtagcggcggc

SEQ ID NO: 1026 - protein, 413 aa, synthetic construct
  REGION 1..413: note = Variant of serine peptidase from Bacillus sinesaloumensis
MADQASQANGNQDVIEGELIVSVEPKNGKPDVSIQSAQSVTGQEDVLKSKGFTIVDTLHVEDSSVKPLVSKNFNKKVVEKMGLVYLVQYSPDQFKSSNIAKKELRKELMDLGFKVRYISENYKMMAIEGTATLQGVHPNQVWHYEMIKAPEAWAITGGSLSVKVAVLDTGIDHNHPSLANFVNTNLGRSFVGGNTMDVQGHGTHVAGTIASYGSVSGVMQSATLIPVKVLDNSGSGSLYGITQGILYAADIDADVINMSLGGGGYNQSMDEAVQTAVAQGTIVVAATGNDGASSISYPAAYSSVIAVGSVDSNRVRSSFSNYGSGLEVMAPGSNIYSTYPNSRYTSLSGTSMATPHVAGVAGLIRAANPDIVVAQARQILRDTAQEAGSFTQYGYGIVDAHAAVVAASGGSGG

SEQ ID NO: 1027 - DNA, 1239 bp, synthetic construct
  misc_feature 1..1239: note = Variant of serine peptidase from Bacillus sinesaloumensis
  source 1..1239: mol_type = other DNA
atggcagatcaagctagtcaagctaatggaaaccaggacgtcattgaaggcgagctgatcgtttcagtggaaccgaagaacggtaaacctgatgtgagcattcaaagtgcacaatccgtaacagggcaggaagacgtccttaaatcgaaaggctttacgatcgttgataccttgcatgtagaggatagcagcgtcaagccactcgtctcgaagaatttcaataagaaagtggtggagaagatgggactggtgtatcttgttcaatactctccggaccagtttaaaagttccaacattgcgaagaaagaactcagaaaagaattgatggatctgggctttaaagtccgctatataagcgaaaattacaagatgatggcgatcgaaggtacagccactcttcagggggtgcaccctaaccaagtttggcattatgagatgattaaagctccggaagcgtgggctattacgtctggatccctgagcgttaaagtagcagtcctggatacagggatcgaccataatcacccatccttggccaacttcgtgaatactaatcttggccgctcgtttgttggaggaaacaccatggatgttcaaggtcatggcacacatgttgctggcacgattgcatcttatgggagtgtaagcggagtgatgcagagtgcgacactgatcccggtcaaagtgctcgataattctggcagcgggtccctttacggtattacgcagggcatattgtatgccgccgacatcgatgcggacgtcattaacatgtctctgggtgggggaggctataatcagagcatggatgaggctgttcaaacagcagttgctcagggaaccattgtagtagcagcgactggcaatgatggtgcatcgtcgatcagttatcctgctgcctacagcagcgtcattgcggtgggatctgtggactccaatcgtgttcgatcctcgttttctaactatggatctgggcttgaagttatggcaccgggcagcaacatctacagtacgtatcctaatagcagatatacgactttgagtggtacaagcatggctactccgcacgttgcgggcgtagctgggctcattcgcgcagccaacccagacatagtggtcgcgcaagcccgtcagattctgcgggataccgcgcaagaagcaggatcgttcacacagtacggctatggaatcgtcgatgctcatgccgccgttgttgctgcatccggtggtagcggcggc

SEQ ID NO: 1028 - protein, 413 aa, synthetic construct
  REGION 1..413: note = Variant of serine peptidase from Bacillus sinesaloumensis
MADQASQANGNQDVIEGELIVSVEPKNGKPDVSIQSAQSVTGQEDVLKSKGFTIVDTLHVEDSSVKPLVSKNFNKKVVEKMGLVYLVQYSPDQFKSSNIAKKELRKELMDLGFKVRYISENYKMMAIEGTATLQGVHPNQVWHYEMIKAPEAWAITSGSLSVKVAVLDTGIDHNHPSLANFVNTNLGRSFVGGNTMDVQGHGTHVAGTIASYGSVSGVMQSATLIPVKVLDNSGSGSLYGITQGILYAADIDADVINMSLGGGGYNQSMDEAVQTAVAQGTIVVAATGNDGASSISYPAAYSSVIAVGSVDSNRVRSSFSNYGSGLEVMAPGSNIYSTYPNSRYTTLSGTSMATPHVAGVAGLIRAANPDIVVAQARQILRDTAQEAGSFTQYGYGIVDAHAAVVAASGGSGG

SEQ ID NO: 1029 - DNA, 1239 bp, synthetic construct
  misc_feature 1..1239: note = Variant of serine peptidase from Bacillus sinesaloumensis
  source 1..1239: mol_type = other DNA
atggcagatcaagctagtcaagctaatggaaaccaggacgtcattgaaggcgagctgatcgtttcagtggaaccgaagaacggtaaacctgatgtgagcattcaaagtgcacaatccgtaacagggcaggaagacgtccttaaatcgaaaggctttacgatcgttgataccttgcatgtagaggatagcagcgtcaagccactcgtctcgaagaatttcaataagaaagtggtggagaagatgggactggtgtatcttgttcaatactctccggaccagtttaaaagttccaacattgcgaagaaagaactcagaaaagaattgatggatctgggctttaaagtccgctatataagcgaaaattacaagatgatggcgatcgaaggtacagccactcttcagggggtgcaccctaaccaagtttggcattatgagatgattaaagctccggaagcgtgggctattacgtctggatccctgagcgttaaagtagcagtcctggatacagggatcgaccataatcacccatccttggccaacttcgtgaatactaatcttggccgctcgtttgttggaggaaacaccatggatgttcaaggtcatggcacacatgttgctggcacgattgcatcttatgggagtgtaagcggagtgatgcagagtgcgacactgatcccggtcaaagtgctcgataattctggcagcgggtccctttacggtattacgcaaggcatattgtatgccgccgacatcgatgcggacgtcattaacatgtctctgggtgcgggaggctataatcagagcatggatgaggctgttcaaacagcagttgctcagggaaccattgtagtagcagcgactggcaatgatggtgcatcgtcgatcagttatcctgctgcctacagcagcgtcattgcggtgggatctgtggacattaatcgtgttcgatcctcgttttctaactatggatctgggcttgaactgatggcaccgggcagcaacatctacagtacgtatcctaatagcagatatcgcactttgagtggtacaagcatggctactccgcacgttgcgggcgtagctgggctcattcgcgcagccaacccagacatagtggtcgcgcaagcccgtcagattctgcgggataccgcgcaagaagcaggatcgttcacacagtacggctatggaatcgtcgatgctcatgccgccgttgttgctgcatccggtggtagcggcggc

SEQ ID NO: 1030 - protein, 413 aa, synthetic construct
  REGION 1..413: note = Variant of serine peptidase from Bacillus sinesaloumensis
MADQASQANGNQDVIEGELIVSVEPKNGKPDVSIQSAQSVTGQEDVLKSKGFTIVDTLHVEDSSVKPLVSKNFNKKVVEKMGLVYLVQYSPDQFKSSNIAKKELRKELMDLGFKVRYISENYKMMAIEGTATLQGVHPNQVWHYEMIKAPEAWAITSGSLSVKVAVLDTGIDHNHPSLANFVNTNLGRSFVGGNTMDVQGHGTHVAGTIASYGSVSGVMQSATLIPVKVLDNSGSGSLYGITQGILYAADIDADVINMSLGAGGYNQSMDEAVQTAVAQGTIVVAATGNDGASSISYPAAYSSVIAVGSVDINRVRSSFSNYGSGLELMAPGSNIYSTYPNSRYRTLSGTSMATPHVAGVAGLIRAANPDIVVAQARQILRDTAQEAGSFTQYGYGIVDAHAAVVAASGGSGG

SEQ ID NO: 1031 - DNA, 1239 bp, synthetic construct
  misc_feature 1..1239: note = Variant of serine peptidase from Bacillus sinesaloumensis
  source 1..1239: mol_type = other DNA
atggcagatcaagctagtcaagctaatggaaaccaggacgtcattgaaggcgagctgatcgtttcagtggaaccgaagaacggtaaacctgatgtgagcattcaaagtgcacaatccgtaacagggcaggaagacgtccttaaatcgaaaggctttacgatcgttgataccttgcatgtagaggatagcagcgtcaagccactcgtctcgaagaatttcaataagaaagtggtggagaagatgggactggtgtatcttgttcaatactctccggaccagtttaaaagttccaacattgcgaagaaagaactcagaaaagaattgatggatctgggctttaaagtccgctatataagcgaaaattacaagatgatggcgatcgaaggtacagccactcttcagggggtgcaccctaaccaagtttggcattatgagatgattaaagctccggaagcgtgggctattacgtctggatccctgagcgttaaagtagcagtcctggatacagggatcgaccataatcacccatccttggccaacttcgtgaatactaatcttggccgctcgtttgttggaggaaacaccatggatgttcaaggtcatggcacacatgttgctggcacgattgcatcttatgggagtgtaagcggagtgatgcagagtgcgacactgatcccggtcaaagtgctcgataattctggcagcgggtccctttacggtattacgcaaggcatattgtatgccgccgacatcgatgcggacgtcattaacatgtctctgggtgcgggaggctataatcagagcatggatgaggctgttcaaacagcagttgctcagggaaccattgtagtagcagcgactggcaatgatggtgcatcgtcgatcagttatcctgctgcctacagcagcgtcattgcggtgggatctgtggacagtaatcgtgttcgatcctcgttttctaactatggatctgggcttgaagttatggcaccgggcagcaacatctacagtacgtatcctaattccagatatacatctttgagtggtacaagcatggctactccgcacgttgcgggcgtagctgggctcattcgcgcagccaacccagacatagtggtcgcgcaagcccgtcagattctgcgggataccgcgcaagaagcaggatcgttcacacagtacggctatggaatcgtcgatgctcatgccgccgttgttgctgcatccggtggtagcggcggc

SEQ ID NO: 1032 - protein, 413 aa, synthetic construct
  REGION 1..413: note = Variant of serine peptidase from Bacillus sinesaloumensis
MADQASQANGNQDVIEGELIVSVEPKNGKPDVSIQSAQSVTGQEDVLKSKGFTIVDTLHVEDSSVKPLVSKNFNKKVVEKMGLVYLVQYSPDQFKSSNIAKKELRKELMDLGFKVRYISENYKMMAIEGTATLQGVHPNQVWHYEMIKAPEAWAITSGSLSVKVAVLDTGIDHNHPSLANFVNTNLGRSFVGGNTMDVQGHGTHVAGTIASYGSVSGVMQSATLIPVKVLDNSGSGSLYGITQGILYAADIDADVINMSLGAGGYNQSMDEAVQTAVAQGTIVVAATGNDGASSISYPAAYSSVIAVGSVDSNRVRSSFSNYGSGLEVMAPGSNIYSTYPNSRYTSLSGTSMATPHVAGVAGLIRAANPDIVVAQARQILRDTAQEAGSFTQYGYGIVDAHAAVVAASGGSGG

SEQ ID NO: 1033 - DNA, 1239 bp, synthetic construct
  misc_feature 1..1239: note = Variant of serine peptidase from Bacillus sinesaloumensis
  source 1..1239: mol_type = other DNA
atggcagatcaagctagtcaagctaatggaaaccaggacgtcattgaaggcgagctgatcgtttcagtggaaccgaagaacggtaaacctgatgtgagcattcaaagtgcacaatccgtaacagggcaggaagacgtccttaaatcgaaaggctttacgatcgttgataccttgcatgtagaggatagcagcgtcaagccactcgtctcgaagaatttcaataagaaagtggtggagaagatgggactggtgtatcttgttcaatactctccggaccagtttaaaagttccaacattgcgaagaaagaactcagaaaagaattgatggatctgggctttaaagtccgctatataagcgaaaattacaagatgatggcgatcgaaggtacagccactcttcagggggtgcaccctaaccaagtttggcattataatatgattaaagctccggaagcgtgggctattacgagtggatccctgagcgttaaagtagcagtcctggatacagggatcgaccataatcacccatccttggccaacttcgtgaatactaatcttggccgctcgtttgttggaggaaacaccatggatgttcaaggtcatggcacacatgttgctggcacgattgcatcttatgggagtgtaagcggagtgatgcagagtgcgacactgatcccggtcaaagtgctcgataattctggcagcgggtccctttacggtattacgcaaggcatattgtatgccgccgacatcgatgcggacgtcattaacatgtctctgggtgggggaggctataatcagagcatggatgaggctgttcaaacagcagttgctcagggaaccattgtagtagcagcgactggcaatgatggtgcatcgtcgatcagttatcctgctgcctacagcagcgtcattgcggtgggatctgtggacattaatcgtgttcgatcctcgttttctaactatggatctgggcttgaagttatggcaccgggcagcaacatctacagtacgtatcctaatggcagatatacgagtttgagtggtacaagcatggctactccgcacgttgcgggcgtagctgggctcattcgcgcagccaacccagacatagtggtcgcgcaagcccgtcagattctgcgggataccgcgcaagaagcaggatcgttcacacagtacggctatggaatcgtcgatgctcatgccgccgttgttgctgcatccggtggtagcggcggc

SEQ ID NO: 1034 - protein, 413 aa, synthetic construct
  REGION 1..413: note = Variant of serine peptidase from Bacillus sinesaloumensis
MADQASQANGNQDVIEGELIVSVEPKNGKPDVSIQSAQSVTGQEDVLKSKGFTIVDTLHVEDSSVKPLVSKNFNKKVVEKMGLVYLVQYSPDQFKSSNIAKKELRKELMDLGFKVRYISENYKMMAIEGTATLQGVHPNQVWHYNMIKAPEAWAITSGSLSVKVAVLDTGIDHNHPSLANFVNTNLGRSFVGGNTMDVQGHGTHVAGTIASYGSVSGVMQSATLIPVKVLDNSGSGSLYGITQGILYAADIDADVINMSLGGGGYNQSMDEAVQTAVAQGTIVVAATGNDGASSISYPAAYSSVIAVGSVDINRVRSSFSNYGSGLEVMAPGSNIYSTYPNGRYTSLSGTSMATPHVAGVAGLIRAANPDIVVAQARQILRDTAQEAGSFTQYGYGIVDAHAAVVAASGGSGG

SEQ ID NO: 1035 - DNA, 1239 bp, synthetic construct
  misc_feature 1..1239: note = Variant of serine peptidase from Bacillus sinesaloumensis
  source 1..1239: mol_type = other DNA
atggcagatcaagctagtcaagctaatggaaaccaggacgtcattgaaggcgagctgatcgtttcagtggaaccgaagaacggtaaacctgatgtgagcattcaaagtgcacaatccgtaacagggcaggaagacgtccttaaatcgaaaggctttacgatcgttgataccttgcatgtagaggatagcagcgtcaagccactcgtctcgaagaatttcaataagaaagtggtggagaagatgggactggtgtatcttgttcaatactctccggaccagtttaaaagttccaacattgcgaagaaagaactcagaaaagaattgatggatctgggctttaaagtccgctatataagcgaaaattacaagatgatggcgatcgaaggtacagccactcttcagggggtgcaccctaaccaagtttgggcgtataatatgattaaagctccggaagcgtgggctattacgagtggatccctgagcgttaaagtagcagtcctggatacagggatcgaccataatcacccatccttggccaacttcgtgaatactaatcttggccgctcgtttgttggaggaaacaccatggatgttcaaggtcatggcacacatgttgctggcacgattgcatcttatgggagtgtaagcggagtgatgcagagtgcgacactgatcccggtcaaagtgctcgataattctggcagcgggtccctttacggtattacgctgggcatattgtatgccgccgacatcgatgcggacgtcattaacatgtctctgggtggaggaggctataatcagagcatggatgaggctgttcaaacagcagttgctcagggaaccattgtagtagcagcgactggcaatgatggtgcatcgtcgatcagttatcctgctgcctacagcagcgtcattgcggtgggatctgtggacagtaatcgtgttcgatcctcgttttctaactatggatctgggcttgaagtgatggcaccgggcagcaacatctacagtacgtatcctaattccagatatacatctttgagtggtacaagcatggctactccgcacgttgcgggcgtagctgggctcattcgcgcagccaacccagacatagtggtcgcgcaagcccgtcagattctgcgggataccgcgcaagaagcaggatcgttcacacagtacggctatggaatcgtcgatgctcatgccgccgttgttgctgcatccggtggtagcggcggc

SEQ ID NO: 1036 - protein, 413 aa, synthetic construct
  REGION 1..413: note = Variant of serine peptidase from Bacillus sinesaloumensis
MADQASQANGNQDVIEGELIVSVEPKNGKPDVSIQSAQSVTGQEDVLKSKGFTIVDTLHVEDSSVKPLVSKNFNKKVVEKMGLVYLVQYSPDQFKSSNIAKKELRKELMDLGFKVRYISENYKMMAIEGTATLQGVHPNQVWAYNMIKAPEAWAITSGSLSVKVAVLDTGIDHNHPSLANFVNTNLGRSFVGGNTMDVQGHGTHVAGTIASYGSVSGVMQSATLIPVKVLDNSGSGSLYGITLGILYAADIDADVINMSLGGGGYNQSMDEAVQTAVAQGTIVVAATGNDGASSISYPAAYSSVIAVGSVDSNRVRSSFSNYGSGLEVMAPGSNIYSTYPNSRYTSLSGTSMATPHVAGVAGLIRAANPDIVVAQARQILRDTAQEAGSFTQYGYGIVDAHAAVVAASGGSGG

SEQ ID NO: 1037 - DNA, 1239 bp, synthetic construct
  misc_feature 1..1239: note = Variant of serine peptidase from Bacillus sinesaloumensis
  source 1..1239: mol_type = other DNA
atggcagatcaagctagtcaagctaatggaaaccaggacgtcattgaaggcgagctgatcgtttcagtggaaccgaagaacggtaaacctgatgtgagcattcaaagtgcacaatccgtaacagggcaggaagacgtccttaaatcgaaaggctttacgatcgttgataccttgcatgtagaggatagcagcgtcaagccactcgtctcgaagaatttcaataagaaagtggtggagaagatgggactggtgtatcttgttcaatactctccggaccagtttaaaagttccaacattgcgaagaaagaactcagaaaagaattgatggatctgggctttaaagtccgctatataagcgaaaattacaagatgatggcgatcgaaggtacagccactcttcagggggtgcacccttgtcaagtttggcattataatatgattaaagctccggaagcgtgggctattacgtctggatccctgagcgttaaagtagcagtcctggatacagggatcgaccataatcacccatccttggccaacttcgtgaatactaatcttggccgctcgtttgttggaggaaacaccatggatgttcaaggtcatggcacacatgttgctggcacgattgcatcttatgggagtgtaagcggagtgatgcagagtgcgacactgatcccggtcaaagtgctcgataattctggcagcgggtccctttacggtattacgcaaggcatattgtatgccgccgacatcgatgcggacgtcattaacatgtctctgggtgggggaggctataatcagagcatggatgaggctgttcaaacagcagttgctcagggaaccattgtagtagcagcgactggcaatgatggtgcatcgtcgatcagttatcctgctgcctacagcagcgtcattgcggtgggatctgtggacagtaatcgtgttcgatcctcgttttctaactatggatctgggcttgaagtgatggcaccgggcagcaacatctacagtacgtatcctaatagcagatatcgcagtttgagtggtacaagcatggctactccgcacgttgcgggcgtagctgggctcattcgcgcagccaacccagacatagtggtcgcgcaagcccgtcagattctgcgggataccgcgcaagaagcaggatcgttcacacagtacggctatggaatcgtcgatgctcatgccgccgttgttgctgcatccggtggtagcggcggc

SEQ ID NO: 1038 - protein, 413 aa, synthetic construct
  REGION 1..413: note = Variant of serine peptidase from Bacillus sinesaloumensis
MADQASQANGNQDVIEGELIVSVEPKNGKPDVSIQSAQSVTGQEDVLKSKGFTIVDTLHVEDSSVKPLVSKNFNKKVVEKMGLVYLVQYSPDQFKSSNIAKKELRKELMDLGFKVRYISENYKMMAIEGTATLQGVHPCQVWHYNMIKAPEAWAITSGSLSVKVAVLDTGIDHNHPSLANFVNTNLGRSFVGGNTMDVQGHGTHVAGTIASYGSVSGVMQSATLIPVKVLDNSGSGSLYGITQGILYAADIDADVINMSLGGGGYNQSMDEAVQTAVAQGTIVVAATGNDGASSISYPAAYSSVIAVGSVDSNRVRSSFSNYGSGLEVMAPGSNIYSTYPNSRYRSLSGTSMATPHVAGVAGLIRAANPDIVVAQARQILRDTAQEAGSFTQYGYGIVDAHAAVVAASGGSGG

SEQ ID NO: 1039 - DNA, 1239 bp, synthetic construct
  misc_feature 1..1239: note = Variant of serine peptidase from Bacillus sinesaloumensis
  source 1..1239: mol_type = other DNA
atggcagatcaagctagtcaagctaatggaaaccaggacgtcattgaaggcgagctgatcgtttcagtggaaccgaagaacggtaaacctgatgtgagcattcaaagtgcacaatccgtaacagggcaggaagacgtccttaaatcgaaaggctttacgatcgttgataccttgcatgtagaggatagcagcgtcaagccactcgtctcgaagaatttcaataagaaagtggtggagaagatgggactggtgtatcttgttcaatactctccggaccagtttaaaagttccaacattgcgaagaaagaactcagaaaagaattgatggatctgggctttaaagtccgctatataagcgaaaattacaagatgatggcgatcgaaggtacagccactcttcagggggtgcaccctaaccaagtttggcattataatatgattaaagctccggaagcgtgggctattacgtctggatccctgagcgttaaagtagcagtcctggatacagggatcgaccataatcacccatccttggccaacttcgtgaatactaatcttggccgctcgtttgttggaggaaacaccatggatgttcaaggtcatggcacacatgttgctggcacgattgcatcttatgggagtgtaagcggagtgatgcagagtgcgacactgatcccggtcaaagtgctcgataattctggcagcgggtccctttacggtattacgcaaggcatattgtatgccgccgacatcgatgcggacgtcattaacatgtctctgggtggaggaggctataatcagagcatggatgaggctgttcaaacagcagttgctcagggaaccattgtagtagcagcgactggcaatgatggtgcatcgtcgatcagttatcctgctgcctacagcagcgtcattgcggtgggatctgtggactccaatcgtgttcgatcctcgttttctaactatggatctgggcttgaagttatggcaccgggcagcaacatctacagtacgtatcctaatggcagatatacgagtttgagtggtacaagcatggctactccgcacgttgcgggcgtagctgggctcattcgcgcagccaacccagacatagtggtcgcgcaagcccgtcagattctgcgggataccgcgcaagaagcaggatcgttcacacagtacggctatggaatcgtcgatgctcatgccgccgttgttgctgcatccggtggtagcggcggc

SEQ ID NO: 1040 - protein, 413 aa, synthetic construct
  REGION 1..413: note = Variant of serine peptidase from Bacillus sinesaloumensis
MADQASQANGNQDVIEGELIVSVEPKNGKPDVSIQSAQSVTGQEDVLKSKGFTIVDTLHVEDSSVKPLVSKNFNKKVVEKMGLVYLVQYSPDQFKSSNIAKKELRKELMDLGFKVRYISENYKMMAIEGTATLQGVHPNQVWHYNMIKAPEAWAITSGSLSVKVAVLDTGIDHNHPSLANFVNTNLGRSFVGGNTMDVQGHGTHVAGTIASYGSVSGVMQSATLIPVKVLDNSGSGSLYGITQGILYAADIDADVINMSLGGGGYNQSMDEAVQTAVAQGTIVVAATGNDGASSISYPAAYSSVIAVGSVDSNRVRSSFSNYGSGLEVMAPGSNIYSTYPNGRYTSLSGTSMATPHVAGVAGLIRAANPDIVVAQARQILRDTAQEAGSFTQYGYGIVDAHAAVVAASGGSGG

SEQ ID NO: 1041 - DNA, 1239 bp, synthetic construct
  misc_feature 1..1239: note = Variant of serine peptidase from Bacillus sinesaloumensis
  source 1..1239: mol_type = other DNA
atggcagatcaagctagtcaagctaatggaaaccaggacgtcattgaaggcgagctgatcgtttcagtggaaccgaagaacggtaaacctgatgtgagcattcaaagtgcacaatccgtaacagggcaggaagacgtccttaaatcgaaaggctttacgatcgttgataccttgcatgtagaggatagcagcgtcaagccactcgtctcgaagaatttcaataagaaagtggtggagaagatgggactggtgtatcttgttcaatactctccggaccagtttaaaagttccaacattgcgaagaaagaactcagaaaagaattgatggatctgggctttaaagtccgctatataagcgaaaattacaagatgatggcgatcgaaggtacagccactcttcagggggtgcaccctaaccaagtttgggcgtatgagatgattaaagctccggaagcgtgggctattacgagtggatccctgagcgttaaagtagcagtcctggataccgggatcgaccataatcacccatccttggccaacttcgtgaatactaatcttggccgctcgtttgttggaggaaacaccatggatgttcaaggtcatggcacacatgttgctggcacgattgcatcttatgggagtgtaagcggagtgatgcagagtgcgacactgatcccggtcaaagtgctcgataattctggcagcgggtccctttacggtattacgcaaggcatattgtatgccgccgacatcgatgcggacgtcattaacatgtctctgggtagcggaggctataatcagagcatggatgaggctgttcaaacagcagttgctcagggaaccattgtagtagcagcgactggcaatgatggtgcatcgtcgatcagttatcctgctgcctacagcagcgtcattgcggtgggatctgtggacagtaatcgtgttcgatcctcgttttctaactatggatctgggcttgaagtgatggcaccgggcagcaacatctacagtacgtatcctaatggcagatatacgagtttgagtggtacaagcatggctactccgcacgttgcgggcgtagctgggctcattcgcgcagccaacccagacatagtggtcgcgcaagcccgtcagattctgcgggataccgcgcaagaagcaggatcgttcacacagtacggctatggaatcgtcgatgctcatgccgccgttgttgctgcatccggtggtagcggcggc

SEQ ID NO: 1042 - protein, 413 aa, synthetic construct
  REGION 1..413: note = Variant of serine peptidase from Bacillus sinesaloumensis
MADQASQANGNQDVIEGELIVSVEPKNGKPDVSIQSAQSVTGQEDVLKSKGFTIVDTLHVEDSSVKPLVSKNFNKKVVEKMGLVYLVQYSPDQFKSSNIAKKELRKELMDLGFKVRYISENYKMMAIEGTATLQGVHPNQVWAYEMIKAPEAWAITSGSLSVKVAVLDTGIDHNHPSLANFVNTNLGRSFVGGNTMDVQGHGTHVAGTIASYGSVSGVMQSATLIPVKVLDNSGSGSLYGITQGILYAADIDADVINMSLGSGGYNQSMDEAVQTAVAQGTIVVAATGNDGASSISYPAAYSSVIAVGSVDSNRVRSSFSNYGSGLEVMAPGSNIYSTYPNGRYTSLSGTSMATPHVAGVAGLIRAANPDIVVAQARQILRDTAQEAGSFTQYGYGIVDAHAAVVAASGGSGG

SEQ ID NO: 1043 - DNA, 1239 bp, synthetic construct
  misc_feature 1..1239: note = Variant of serine peptidase from Bacillus sinesaloumensis
  source 1..1239: mol_type = other DNA
atggcagatcaagctagtcaagctaatggaaaccaggacgtcattgaaggcgagctgatcgtttcagtggaaccgaagaacggtaaacctgatgtgagcattcaaagtgcacaatccgtaacagggcaggaagacgtccttaaatcgaaaggctttacgatcgttgataccttgcatgtagaggatagcagcgtcaagccactcgtctcgaagaatttcaataagaaagtggtggagaagatgggactggtgtatcttgttcaatactctccggaccagtttaaaagttccaacattgcgaagaaagaactcagaaaagaattgatggatctgggctttaaagtccgctatataagcgaaaattacaagatgatggcgatcgaaggtacagccactcttcagggggtgcaccctctgcaagtttgggcgtataatatgattaaagctccggaagcgtgggctattacgtctggatccctgagcgttaaagtagcagtcctggatagcgggatcgaccataatcacccatccttggccaacttcgtgaatactaatcttggccgctcgtttgttggaggaaacaccatggatgttcaaggtcatggcacacatgttgctggcacgattgcatcttatgggagtgtaagcggagtgatgcagagtgcgacactgatcccggtcaaagtgctcgataattctggcagcgggtccctttacggtattacgcaaggcatattgtatgccgccgacatcgatgcggacgtcattaacatgtctctgggtgggggaggctataatcagagcatggatgaggctgttcaaacagcagttgctcagggaaccattgtagtagcagcgactggcaatgatggtgcatcgtcgatcagttatcctgctgcctacagcagcgtcattgcggtgggatctgtggactccaatcgtgttcgatcctcgttttctaactatggatctgggcttgaagtgatggcaccgggcagcaacatctacagtacgtatcctaattccagatatacatctttgagtggtacaagcatggctactccgcacgttgcgggcgtagctgggctcattcgcgcagccaacccagacatagtggtcgcgcaagcccgtcagattctgcgggataccgcgcaagaagcaggatcgttcacacagtacggctatggaatcgtcgatgctcatgccgccgttgttgctgcatccggtggtagcggcggc

SEQ ID NO: 1044 - protein, 413 aa, synthetic construct
  REGION 1..413: note = Variant of serine peptidase from Bacillus sinesaloumensis
MADQASQANGNQDVIEGELIVSVEPKNGKPDVSIQSAQSVTGQEDVLKSKGFTIVDTLHVEDSSVKPLVSKNFNKKVVEKMGLVYLVQYSPDQFKSSNIAKKELRKELMDLGFKVRYISENYKMMAIEGTATLQGVHPLQVWAYNMIKAPEAWAITSGSLSVKVAVLDSGIDHNHPSLANFVNTNLGRSFVGGNTMDVQGHGTHVAGTIASYGSVSGVMQSATLIPVKVLDNSGSGSLYGITQGILYAADIDADVINMSLGGGGYNQSMDEAVQTAVAQGTIVVAATGNDGASSISYPAAYSSVIAVGSVDSNRVRSSFSNYGSGLEVMAPGSNIYSTYPNSRYTSLSGTSMATPHVAGVAGLIRAANPDIVVAQARQILRDTAQEAGSFTQYGYGIVDAHAAVVAASGGSGG

SEQ ID NO: 1045 - DNA, 1239 bp, synthetic construct
  misc_feature 1..1239: note = Variant of serine peptidase from Bacillus sinesaloumensis
  source 1..1239: mol_type = other DNA
atggcagatcaagctagtcaagctaatggaaaccaggacgtcattgaaggcgagctgatcgtttcagtggaaccgaagaacggtaaacctgatgtgagcattcaaagtgcacaatccgtaacagggcaggaagacgtccttaaatcgaaaggctttacgatcgttgataccttgcatgtagaggatagcagcgtcaagccactcgtctcgaagaatttcaataagaaagtggtggagaagatgggactggtgtatcttgttcaatactctccggaccagtttaaaagttccaacattgcgaagaaagaactcagaaaagaattgatggatctgggctttaaagtccgctatataagcgaaaattacaagatgatggcgatcgaaggtacagccactcttcagggggtgcacccttgtcaagtttgggcgtatgagatgattaaagctccggaagcgtgggctattacgtctggatccctgagcgttaaagtagcagtcctggataccgggatcgaccataatcacccatccttggccaacttcgtgaatactaatcttggccgctcgtttgttggaggaaacaccatggatgttcaaggtcatggcacacatgttgctggcacgattgcatcttatgggagtgtaagcggagtgatgcagagtgcgacactgatcccggtcaaagtgctcgataattctggcagcgggtccctttacggtattacgcagggcatattgtatgccgccgacatcgatgcggacgtcattaacatgtctctgggtgggggaggctataatcagagcatggatgaggctgttcaaacagcagttgctcagggaaccattgtagtagcagcgactggcaatgatggtgcatcgtcgatcagttatcctgctgcctacagcagcgtcattgcggtgggatctgtggacattaatcgtgttcgatcctcgttttctaactatggatctgggcttgaagtgatggcaccgggcagcaacatctacagtacgtatcctaattccagatatacatctttgagtggtacaagcatggctactccgcacgttgcgggcgtagctgggctcattcgcgcagccaacccagacatagtggtcgcgcaagcccgtcagattctgcgggataccgcgcaagaagcaggatcgttcacacagtacggctatggaatcgtcgatgctcatgccgccgttgttgctgcatccggtggtagcggcggc

SEQ ID NO: 1046 - protein, 413 aa, synthetic construct
  REGION 1..413: note = Variant of serine peptidase from Bacillus sinesaloumensis
MADQASQANGNQDVIEGELIVSVEPKNGKPDVSIQSAQSVTGQEDVLKSKGFTIVDTLHVEDSSVKPLVSKNFNKKVVEKMGLVYLVQYSPDQFKSSNIAKKELRKELMDLGFKVRYISENYKMMAIEGTATLQGVHPCQVWAYEMIKAPEAWAITSGSLSVKVAVLDTGIDHNHPSLANFVNTNLGRSFVGGNTMDVQGHGTHVAGTIASYGSVSGVMQSATLIPVKVLDNSGSGSLYGITQGILYAADIDADVINMSLGGGGYNQSMDEAVQTAVAQGTIVVAATGNDGASSISYPAAYSSVIAVGSVDINRVRSSFSNYGSGLEVMAPGSNIYSTYPNSRYTSLSGTSMATPHVAGVAGLIRAANPDIVVAQARQILRDTAQEAGSFTQYGYGIVDAHAAVVAASGGSGG

SEQ ID NO: 1047 - DNA, 1239 bp, synthetic construct
  misc_feature 1..1239: note = Variant of serine peptidase from Bacillus sinesaloumensis
  source 1..1239: mol_type = other DNA
atggcagatcaagctagtcaagctaatggaaaccaggacgtcattgaaggcgagctgatcgtttcagtggaaccgaagaacggtaaacctgatgtgagcattcaaagtgcacaatccgtaacagggcaggaagacgtccttaaatcgaaaggctttacgatcgttgataccttgcatgtagaggatagcagcgtcaagccactcgtctcgaagaatttcaataagaaagtggtggagaagatgggactggtgtatcttgttcaatactctccggaccagtttaaaagttccaacattgcgaagaaagaactcagaaaagaattgatggatctgggctttaaagtccgctatataagcgaaaattacaagatgatggcgatcgaaggtacagccactcttcagggggtgcaccctaaccaagtttggcattataatatgattaaagctccggaagcgtgggctattacgtctggatccctgagcgttaaagtagcagtcctggatagcgggatcgaccataatcacccatccttggccaacttcgtgaatactaatcttggccgctcgtttgttggaggaaacaccatggatgttcaaggtcatggcacacatgttgctggcacgattgcatcttatgggagtgtaagcggagtgatgcagagtgcgacactgatcccggtcaaagtgctcgataattctggcagcgggtccctttacggtattacgcaaggcatattgtatgccgccgacatcgatgcggacgtcattaacatgtctctgggtggaggaggctataatcagagcatggatgaggctgttcaaacagcagttgctcagggaaccattgtagtagcagcgactggcaatgatggtgcatcgtcgatcagttatcctgctgcctacagcagcgtcattgcggtgggatctgtggacagtaatcgtgttcgatcctcgttttctaactatggatctgggcttgaagttatggcaccgggcagcaacatctacagtacgtatcctaattccagatatacatctttgagtggtacaagcatggctactccgcacgttgcgggcgtagctgggctcattcgcgcagccaacccagacatagtggtcgcgcaagcccgtcagattctgcgggataccgcgcaagaagcaggatcgttcacacagtacggctatggaatcgtcgatgctcatgccgccgttgttgctgcatccggtggtagcggcggc

SEQ ID NO: 1048 - protein, 413 aa, synthetic construct
  REGION 1..413: note = Variant of serine peptidase from Bacillus sinesaloumensis
MADQASQANGNQDVIEGELIVSVEPKNGKPDVSIQSAQSVTGQEDVLKSKGFTIVDTLHVEDSSVKPLVSKNFNKKVVEKMGLVYLVQYSPDQFKSSNIAKKELRKELMDLGFKVRYISENYKMMAIEGTATLQGVHPNQVWHYNMIKAPEAWAITSGSLSVKVAVLDSGIDHNHPSLANFVNTNLGRSFVGGNTMDVQGHGTHVAGTIASYGSVSGVMQSATLIPVKVLDNSGSGSLYGITQGILYAADIDADVINMSLGGGGYNQSMDEAVQTAVAQGTIVVAATGNDGASSISYPAAYSSVIAVGSVDSNRVRSSFSNYGSGLEVMAPGSNIYSTYPNSRYTSLSGTSMATPHVAGVAGLIRAANPDIVVAQARQILRDTAQEAGSFTQYGYGIVDAHAAVVAASGGSGG

SEQ ID NO: 1049 - DNA, 1239 bp, synthetic construct
  misc_feature 1..1239: note = Variant of serine peptidase from Bacillus sinesaloumensis
  source 1..1239: mol_type = other DNA
atggcagatcaagctagtcaagctaatggaaaccaggacgtcattgaaggcgagctgatcgtttcagtggaaccgaagaacggtaaacctgatgtgagcattcaaagtgcacaatccgtaacagggcaggaagacgtccttaaatcgaaaggctttacgatcgttgataccttgcatgtagaggatagcagcgtcaagccactcgtctcgaagaatttcaataagaaagtggtggagaagatgggactggtgtatcttgttcaatactctccggaccagtttaaaagttccaacattgcgaagaaagaactcagaaaagaattgatggatctgggctttaaagtccgctatataagcgaaaattacaagatgatggcgatcgaaggtacagccactcttcagggggtgcaccccctgcaagtttggcattatgagatgattaaagctccggaagcgtgggctattacgtctggatccctgagcgttaaagtagcagtcctggatacagggatcgaccataatcacccatccttggccaacttcgtgaatactaatcttggccgctcgtttgttggaggaaacaccatggatgttcaaggtcatggcacacatgttgctggcacgattgcatcttatgggagtgtaagcggagtgatgcagagtgcgacactgatcccggtcaaagtgctcgataattctggcagcgggtccctttacggtattacgcaaggcatattgtatgccgccgacatcgatgcggacgtcattaacatgtctctgggtgcgggaggctataatcagagcatggatgaggctgttcaaacagcagttgctcagggaaccattgtagtagcagcgactggcaatgatggtgcatcgtcgatcagttatcctgctgcctacagcagcgtcattgcggtgggatctgtggacattaatcgtgttcgatcctcgttttctaactatggatctgggcttgaactgatggcaccgggcagcaacatctacagtacgtatcctaatggcagatatcgcactttgagtggtacaagcatggctactccgcacgttgcgggcgtagctgggctcattcgcgcagccaacccagacatagtggtcgcgcaagcccgtcagattctgcgggataccgcgcaagaagcaggatcgttcacacagtacggctatggaatcgtcgatgctcatgccgccgttgttgctgcatccggtggtagcggcggc

SEQ ID NO: 1050 - protein, 413 aa, synthetic construct
  REGION 1..413: note = Variant of serine peptidase from Bacillus sinesaloumensis
MADQASQANGNQDVIEGELIVSVEPKNGKPDVSIQSAQSVTGQEDVLKSKGFTIVDTLHVEDSSVKPLVSKNFNKKVVEKMGLVYLVQYSPDQFKSSNIAKKELRKELMDLGFKVRYISENYKMMAIEGTATLQGVHPLQVWHYEMIKAPEAWAITSGSLSVKVAVLDTGIDHNHPSLANFVNTNLGRSFVGGNTMDVQGHGTHVAGTIASYGSVSGVMQSATLIPVKVLDNSGSGSLYGITQGILYAADIDADVINMSLGAGGYNQSMDEAVQTAVAQGTIVVAATGNDGASSISYPAAYSSVIAVGSVDINRVRSSFSNYGSGLELMAPGSNIYSTYPNGRYRTLSGTSMATPHVAGVAGLIRAANPDIVVAQARQILRDTAQEAGSFTQYGYGIVDAHAAVVAASGGSGG

SEQ ID NO: 1051 - DNA, 1239 bp, synthetic construct
  misc_feature 1..1239: note = Variant of serine peptidase from Bacillus sinesaloumensis
  source 1..1239: mol_type = other DNA
atggcagatcaagctagtcaagctaatggaaaccaggacgtcattgaaggcgagctgatcgtttcagtggaaccgaagaacggtaaacctgatgtgagcattcaaagtgcacaatccgtaacagggcaggaagacgtccttaaatcgaaaggctttacgatcgttgataccttgcatgtagaggatagcagcgtcaagccactcgtctcgaagaatttcaataagaaagtggtggagaagatgggactggtgtatcttgttcaatactctccggaccagtttaaaagttccaacattgcgaagaaagaactcagaaaagaattgatggatctgggctttaaagtccgctatataagcgaaaattacaagatgatggcgatcgaaggtacagccactcttcagggggtgcacccttgtcaagtttggcattataatatgattaaagctccggaagcgtgggctattacgtctggatccctgagcgttaaagtagcagtcctggatacagggatcgaccataatcacccatccttggccaacttcgtgaatactaatcttggccgctcgtttgttggaggaaacaccatggatgttcaaggtcatggcacacatgttgctggcacgattgcatcttatgggagtgtaagcggagtgatgcagagtgcgacactgatcccggtcaaagtgctcgataattctggcagcgggtccctttacggtattacgcaaggcatattgtatgccgccgacatcgatgcggacgtcattaacatgtctctgggtgggggaggctataatcagagcatggatgaggctgttcaaacagcagttgctcagggaaccattgtagtagcagcgactggcaatgatggtgcatcgtcgatcagttatcctgctgcctacagcagcgtcattgcggtgggatctgtggacagtaatcgtgttcgatcctcgttttctaactatggatctgggcttgaactgatggcaccgggcagcaacatctacagtacgtatcctaatagcagatatacgagtttgagtggtacaagcatggctactccgcacgttgcgggcgtagctgggctcattcgcgcagccaacccagacatagtggtcgcgcaagcccgtcagattctgcgggataccgcgcaagaagcaggatcgttcacacagtacggctatggaatcgtcgatgctcatgccgccgttgttgctgcatccggtggtagcggcggc

SEQ ID NO: 1052 - protein, 413 aa, synthetic construct
  REGION 1..413: note = Variant of serine peptidase from Bacillus sinesaloumensis
MADQASQANGNQDVIEGELIVSVEPKNGKPDVSIQSAQSVTGQEDVLKSKGFTIVDTLHVEDSSVKPLVSKNFNKKVVEKMGLVYLVQYSPDQFKSSNIAKKELRKELMDLGFKVRYISENYKMMAIEGTATLQGVHPCQVWHYNMIKAPEAWAITSGSLSVKVAVLDTGIDHNHPSLANFVNTNLGRSFVGGNTMDVQGHGTHVAGTIASYGSVSGVMQSATLIPVKVLDNSGSGSLYGITQGILYAADIDADVINMSLGGGGYNQSMDEAVQTAVAQGTIVVAATGNDGASSISYPAAYSSVIAVGSVDSNRVRSSFSNYGSGLELMAPGSNIYSTYPNSRYTSLSGTSMATPHVAGVAGLIRAANPDIVVAQARQILRDTAQEAGSFTQYGYGIVDAHAAVVAASGGSGG

SEQ ID NO: 1053 - DNA, 1239 bp, synthetic construct
  misc_feature 1..1239: note = Variant of serine peptidase from Bacillus sinesaloumensis
  source 1..1239: mol_type = other DNA
atggcagatcaagctagtcaagctaatggaaaccaggacgtcattgaaggcgagctgatcgtttcagtggaaccgaagaacggtaaacctgatgtgagcattcaaagtgcacaatccgtaacagggcaggaagacgtccttaaatcgaaaggctttacgatcgttgataccttgcatgtagaggatagcagcgtcaagccactcgtctcgaagaatttcaataagaaagtggtggagaagatgggactggtgtatcttgttcaatactctccggaccagtttaaaagttccaacattgcgaagaaagaactcagaaaagaattgatggatctgggctttaaagtccgctatataagcgaaaattacaagatgatggcgatcgaaggtacagccactcttcagggggtgcaccctctgcaagtttggcattataatatgattaaagctccggaagcgtgggctattacgtctggatccctgagcgttaaagtagcagtcctggatacagggatcgaccataatcacccatccttggccaacttcgtgaatactaatcttggccgctcgtttgttggaggaaacaccatggatgttcaaggtcatggcacacatgttgctggcacgattgcatcttatgggagtgtaagcggagtgatgcagagtgcgacactgatcccggtcaaagtgctcgataattctggcagcgggtccctttacggtattacgctgggcatattgtatgccgccgacatcgatgcggacgtcattaacatgtctctgggtggaggaggctataatcagagcatggatgaggctgttcaaacagcagttgctcagggaaccattgtagtagcagcgactggcaatgatggtgcatcgtcgatcagttatcctgctgcctacagcagcgtcattgcggtgggatctgtggactccaatcgtgttcgatcctcgttttctaactatggatctgggcttgaagttatggcaccgggcagcaacatctacagtacgtatcctaattccagatatacatctttgagtggtacaagcatggctactccgcacgttgcgggcgtagctgggctcattcgcgcagccaacccagacatagtggtcgcgcaagcccgtcagattctgcgggataccgcgcaagaagcaggatcgttcacacagtacggctatggaatcgtcgatgctcatgccgccgttgttgctgcatccggtggtagcggcggc

SEQ ID NO: 1054 - protein, 413 aa, synthetic construct
  REGION 1..413: note = Variant of serine peptidase from Bacillus sinesaloumensis
MADQASQANGNQDVIEGELIVSVEPKNGKPDVSIQSAQSVTGQEDVLKSKGFTIVDTLHVEDSSVKPLVSKNFNKKVVEKMGLVYLVQYSPDQFKSSNIAKKELRKELMDLGFKVRYISENYKMMAIEGTATLQGVHPLQVWHYNMIKAPEAWAITSGSLSVKVAVLDTGIDHNHPSLANFVNTNLGRSFVGGNTMDVQGHGTHVAGTIASYGSVSGVMQSATLIPVKVLDNSGSGSLYGITLGILYAADIDADVINMSLGGGGYNQSMDEAVQTAVAQGTIVVAATGNDGASSISYPAAYSSVIAVGSVDSNRVRSSFSNYGSGLEVMAPGSNIYSTYPNSRYTSLSGTSMATPHVAGVAGLIRAANPDIVVAQARQILRDTAQEAGSFTQYGYGIVDAHAAVVAASGGSGG

SEQ ID NO: 1055 - DNA, 1239 bp, synthetic construct
  misc_feature 1..1239: note = Variant of serine peptidase from Bacillus sinesaloumensis
  source 1..1239: mol_type = other DNA
atggcagatcaagctagtcaagctaatggaaaccaggacgtcattgaaggcgagctgatcgtttcagtggaaccgaagaacggtaaacctgatgtgagcattcaaagtgcacaatccgtaacagggcaggaagacgtccttaaatcgaaaggctttacgatcgttgataccttgcatgtagaggatagcagcgtcaagccactcgtctcgaagaatttcaataagaaagtggtggagaagatgggactggtgtatcttgttcaatactctccggaccagtttaaaagttccaacattgcgaagaaagaactcagaaaagaattgatggatctgggctttaaagtccgctatataagcgaaaattacaagatgatggcgatcgaaggtacagccactcttcagggggtgcaccctctgcaagtttgggcgtataatatgattaaagctccggaagcgtgggctattacgtctggatccctgagcgttaaagtagcagtcctggatacagggatcgaccataatcacccatccttggccaacttcgtgaatactaatcttggccgctcgtttgttggaggaaacaccatggatgttcaaggtcatggcacacatgttgctggcacgattgcatcttatgggagtgtaagcggagtgatgcagagtgcgacactgatcccggtcaaagtgctcgataattctggcagcgggtccctttacggtattacgcaaggcatattgtatgccgccgacatcgatgcggacgtcattaacatgtctctgggtggaggaggctataatcagagcatggatgaggctgttcaaacagcagttgctcagggaaccattgtagtagcagcgactggcaatgatggtgcatcgtcgatcagttatcctgctgcctacagcagcgtcattgcggtgggatctgtggacagtaatcgtgttcgatcctcgttttctaactatggatctgggcttgaactgatggcaccgggcagcaacatctacagtacgtatcctaattccagatatacatctttgagtggtacaagcatggctactccgcacgttgcgggcgtagctgggctcattcgcgcagccaacccagacatagtggtcgcgcaagcccgtcagattctgcgggataccgcgcaagaagcaggatcgttcacacagtacggctatggaatcgtcgatgctcatgccgccgttgttgctgcatccggtggtagcggcggc

SEQ ID NO: 1056 - protein, 413 aa, synthetic construct
  REGION 1..413: note = Variant of serine peptidase from Bacillus sinesaloumensis
MADQASQANGNQDVIEGELIVSVEPKNGKPDVSIQSAQSVTGQEDVLKSKGFTIVDTLHVEDSSVKPLVSKNFNKKVVEKMGLVYLVQYSPDQFKSSNIAKKELRKELMDLGFKVRYISENYKMMAIEGTATLQGVHPLQVWAYNMIKAPEAWAITSGSLSVKVAVLDTGIDHNHPSLANFVNTNLGRSFVGGNTMDVQGHGTHVAGTIASYGSVSGVMQSATLIPVKVLDNSGSGSLYGITQGILYAADIDADVINMSLGGGGYNQSMDEAVQTAVAQGTIVVAATGNDGASSISYPAAYSSVIAVGSVDSNRVRSSFSNYGSGLELMAPGSNIYSTYPNSRYTSLSGTSMATPHVAGVAGLIRAANPDIVVAQARQILRDTAQEAGSFTQYGYGIVDAHAAVVAASGGSGG

SEQ ID NO: 1057 - DNA, 1239 bp, synthetic construct
  misc_feature 1..1239: note = Variant of serine peptidase from Bacillus sinesaloumensis
  source 1..1239: mol_type = other DNA
atggcagatcaagctagtcaagctaatggaaaccaggacgtcattgaaggcgagctgatcgtttcagtggaaccgaagaacggtaaacctgatgtgagcattcaaagtgcacaatccgtaacagggcaggaagacgtccttaaatcgaaaggctttacgatcgttgataccttgcatgtagaggatagcagcgtcaagccactcgtctcgaagaatttcaataagaaagtggtggagaagatgggactggtgtatcttgttcaatactctccggaccagtttaaaagttccaacattgcgaagaaagaactcagaaaagaattgatggatctgggctttaaagtccgctatataagcgaaaattacaagatgatggcgatcgaaggtacagccactcttcagggggtgcaccctctgcaagtttggcattataatatgattaaagctccggaagcgtgggctattacgagtggatccctgagcgttaaagtagcagtcctggatacagggatcgaccataatcacccatccttggccaacttcgtgaatactaatcttggccgctcgtttgttggaggaaacaccatggatgttcaaggtcatggcacacatgttgctggcacgattgcatcttatgggagtgtaagcggagtgatgcagagtgcgacactgatcccggtcaaagtgctcgataattctggcagcgggtccctttacggtattacgcagggcatattgtatgccgccgacatcgatgcggacgtcattaacatgtctctgggtggaggaggctataatcagagcatggatgaggctgttcaaacagcagttgctcagggaaccattgtagtagcagcgactggcaatgatggtgcatcgtcgatcagttatcctgctgcctacagcagcgtcattgcggtgggatctgtggacagtaatcgtgttcgatcctcgttttctaactatggatctgggcttgaagtgatggcaccgggcagcaacatctacagtacgtatcctaattccagatatacatctttgagtggtacaagcatggctactccgcacgttgcgggcgtagctgggctcattcgcgcagccaacccagacatagtggtcgcgcaagcccgtcagattctgcgggataccgcgcaagaagcaggatcgttcacacagtacggctatggaatcgtcgatgctcatgccgccgttgttgctgcatccggtggtagcggcggc

SEQ ID NO: 1058 - protein, 413 aa, synthetic construct
  REGION 1..413: note = Variant of serine peptidase from Bacillus sinesaloumensis
MADQASQANGNQDVIEGELIVSVEPKNGKPDVSIQSAQSVTGQEDVLKSKGFTIVDTLHVEDSSVKPLVSKNFNKKVVEKMGLVYLVQYSPDQFKSSNIAKKELRKELMDLGFKVRYISENYKMMAIEGTATLQGVHPLQVWHYNMIKAPEAWAITSGSLSVKVAVLDTGIDHNHPSLANFVNTNLGRSFVGGNTMDVQGHGTHVAGTIASYGSVSGVMQSATLIPVKVLDNSGSGSLYGITQGILYAADIDADVINMSLGGGGYNQSMDEAVQTAVAQGTIVVAATGNDGASSISYPAAYSSVIAVGSVDSNRVRSSFSNYGSGLEVMAPGSNIYSTYPNSRYTSLSGTSMATPHVAGVAGLIRAANPDIVVAQARQILRDTAQEAGSFTQYGYGIVDAHAAVVAASGGSGG

SEQ ID NO: 1059 - DNA, 1239 bp, synthetic construct
  misc_feature 1..1239: note = Variant of serine peptidase from Bacillus sinesaloumensis
  source 1..1239: mol_type = other DNA
atggcagatcaagctagtcaagctaatggaaaccaggacgtcattgaaggcgagctgatcgtttcagtggaaccgaagaacggtaaacctgatgtgagcattcaaagtgcacaatccgtaacagggcaggaagacgtccttaaatcgaaaggctttacgatcgttgataccttgcatgtagaggatagcagcgtcaagccactcgtctcgaagaatttcaataagaaagtggtggagaagatgggactggtgtatcttgttcaatactctccggaccagtttaaaagttccaacattgcgaagaaagaactcagaaaagaattgatggatctgggctttaaagtccgctatataagcgaaaattacaagatgatggcgatcgaaggtacagccactcttcagggggtgcacccttgtcaagtttgggcgtataatatgattaaagctccggaagcgtgggctattacgtctggatccctgagcgttaaagtagcagtcctggatacagggatcgaccataatcacccatccttggccaacttcgtgaatactaatcttggccgctcgtttgttggaggaaacaccatggatgttcaaggtcatggcacacatgttgctggcacgattgcatcttatgggagtgtaagcggagtgatgcagagtgcgacactgatcccggtcaaagtgctcgataattctggcagcgggtccctttacggtattacgctgggcatattgtatgccgccgacatcgatgcggacgtcattaacatgtctctgggtgggggaggctataatcagagcatggatgaggctgttcaaacagcagttgctcagggaaccattgtagtagcagcgactggcaatgatggtgcatcgtcgatcagttatcctgctgcctacagcagcgtcattgcggtgggatctgtggacagtaatcgtgttcgatcctcgttttctaactatggatctgggcttgaagtgatggcaccgggcagcaacatctacagtacgtatcctaattccagatatacatctttgagtggtacaagcatggctactccgcacgttgcgggcgtagctgggctcattcgcgcagccaacccagacatagtggtcgcgcaagcccgtcagattctgcgggataccgcgcaagaagcaggatcgttcacacagtacggctatggaatcgtcgatgctcatgccgccgttgttgctgcatccggtggtagcggcggc

SEQ ID NO: 1060 - protein, 413 aa, synthetic construct
  REGION 1..413: note = Variant of serine peptidase from Bacillus sinesaloumensis
MADQASQANGNQDVIEGELIVSVEPKNGKPDVSIQSAQSVTGQEDVLKSKGFTIVDTLHVEDSSVKPLVSKNFNKKVVEKMGLVYLVQYSPDQFKSSNIAKKELRKELMDLGFKVRYISENYKMMAIEGTATLQGVHPCQVWAYNMIKAPEAWAITSGSLSVKVAVLDTGIDHNHPSLANFVNTNLGRSFVGGNTMDVQGHGTHVAGTIASYGSVSGVMQSATLIPVKVLDNSGSGSLYGITLGILYAADIDADVINMSLGGGGYNQSMDEAVQTAVAQGTIVVAATGNDGASSISYPAAYSSVIAVGSVDSNRVRSSFSNYGSGLEVMAPGSNIYSTYPNSRYTSLSGTSMATPHVAGVAGLIRAANPDIVVAQARQILRDTAQEAGSFTQYGYGIVDAHAAVVAASGGSGG

SEQ ID NO: 1061 - DNA, 1239 bp, synthetic construct
  misc_feature 1..1239: note = Variant of serine peptidase from Bacillus sinesaloumensis
  source 1..1239: mol_type = other DNA
atggcagatcaagctagtcaagctaatggaaaccaggacgtcattgaaggcgagctgatcgtttcagtggaaccgaagaacggtaaacctgatgtgagcattcaaagtgcacaatccgtaacagggcaggaagacgtccttaaatcgaaaggctttacgatcgttgataccttgcatgtagaggatagcagcgtcaagccactcgtctcgaagaatttcaataagaaagtggtggagaagatgggactggtgtatcttgttcaatactctccggaccagtttaaaagttccaacattgcgaagaaagaactcagaaaagaattgatggatctgggctttaaagtccgctatataagcgaaaattacaagatgatggcgatcgaaggtacagccactcttcagggggtgcacccttgtcaagtttggcattatgagatgattaaagctccggaagcgtgggctattacgtctggatccctgagcgttaaagtagcagtcctggatacagggatcgaccataatcacccatccttggccaacttcgtgaatactaatcttggccgctcgtttgttggaggaaacaccatggatgttcaaggtcatggcacacatgttgctggcacgattgcatcttatgggagtgtaagcggagtgatgcagagtgcgacactgatcccggtcaaagtgctcgataattctggcagcgggtccctttacggtattacgcaaggcatattgtatgccgccgacatcgatgcggacgtcattaacatgtctctgggtggaggaggctataatcagagcatggatgaggctgttcaaacagcagttgctcagggaaccattgtagtagcagcgactggcaatgatggtgcatcgtcgatcagttatcctgctgcctacagcagcgtcattgcggtgggatctgtggactccaatcgtgttcgatcctcgttttctaactatggatctgggcttgaagttatggcaccgggcagcaacatctacagtacgtatcctaattccagatatacatctttgagtggtacaagcatggctactccgcacgttgcgggcgtagctgggctcattcgcgcagccaacccagacatagtggtcgcgcaagcccgtcagattctgcgggataccgcgcaagaagcaggatcgttcacacagtacggctatggaatcgtcgatgctcatgccgccgttgttgctgcatccggtggtagcggcggc

SEQ ID NO: 1062 - protein, 413 aa, synthetic construct
  REGION 1..413: note = Variant of serine peptidase from Bacillus sinesaloumensis
MADQASQANGNQDVIEGELIVSVEPKNGKPDVSIQSAQSVTGQEDVLKSKGFTIVDTLHVEDSSVKPLVSKNFNKKVVEKMGLVYLVQYSPDQFKSSNIAKKELRKELMDLGFKVRYISENYKMMAIEGTATLQGVHPCQVWHYEMIKAPEAWAITSGSLSVKVAVLDTGIDHNHPSLANFVNTNLGRSFVGGNTMDVQGHGTHVAGTIASYGSVSGVMQSATLIPVKVLDNSGSGSLYGITQGILYAADIDADVINMSLGGGGYNQSMDEAVQTAVAQGTIVVAATGNDGASSISYPAAYSSVIAVGSVDSNRVRSSFSNYGSGLEVMAPGSNIYSTYPNSRYTSLSGTSMATPHVAGVAGLIRAANPDIVVAQARQILRDTAQEAGSFTQYGYGIVDAHAAVVAASGGSGG

SEQ ID NO: 1063 - DNA, 1239 bp, synthetic construct
  misc_feature 1..1239: note = Variant of serine peptidase from Bacillus sinesaloumensis
  source 1..1239: mol_type = other DNA
atggcagatcaagctagtcaagctaatggaaaccaggacgtcattgaaggcgagctgatcgtttcagtggaaccgaagaacggtaaacctgatgtgagcattcaaagtgcacaatccgtaacagggcaggaagacgtccttaaatcgaaaggctttacgatcgttgataccttgcatgtagaggatagcagcgtcaagccactcgtctcgaagaatttcaataagaaagtggtggagaagatgggactggtgtatcttgttcaatactctccggaccagtttaaaagttccaacattgcgaagaaagaactcagaaaagaattgatggatctgggctttaaagtccgctatataagcgaaaattacaagatgatggcgatcgaaggtacagccactcttcagggggtgcaccctaaccaagtttggcattatgagatgattaaagctccggaagcgtgggctattacgtctggatccctgagcgttaaagtagcagtcctggatacagggatcgaccataatcacccatccttggccaacttcgtgaatactaatcttggccgctcgtttgttggaggaaacaccatggatgttcaaggtcatggcacacatgttgctggcacgattgcatcttatgggagtgtaagcggagtgatgcagagtgcgacactgatcccggtcaaagtgctcgataattctggcagcgggtccctttacggtattacgcaaggcatattgtatgccgccgacatcgatgcggacgtcattaacatgtctctgggtggaggaggctataatcagagcatggatgaggctgttcaaacagcagttgctcagggaaccattgtagtagcagcgactggcaatgatggtgcatcgtcgatcagttatcctgctgcctacagcagcgtcattgcggtgggatctgtggacattaatcgtgttcgatcctcgttttctaactatggatctgggcttgaagtgatggcaccgggcagcaacatctacagtacgtatcctaattccagatatacatctttgagtggtacaagcatggctactccgcacgttgcgggcgtagctgggctcattcgcgcagccaacccagacatagtggtcgcgcaagcccgtcagattctgcgggataccgcgcaagaagcaggatcgttcacacagtacggctatggaatcgtcgatgctcatgccgccgttgttgctgcatccggtggtagcggcggc

SEQ ID NO: 1064 - protein, 413 aa, synthetic construct
  REGION 1..413: note = Variant of serine peptidase from Bacillus sinesaloumensis
MADQASQANGNQDVIEGELIVSVEPKNGKPDVSIQSAQSVTGQEDVLKSKGFTIVDTLHVEDSSVKPLVSKNFNKKVVEKMGLVYLVQYSPDQFKSSNIAKKELRKELMDLGFKVRYISENYKMMAIEGTATLQGVHPNQVWHYEMIKAPEAWAITSGSLSVKVAVLDTGIDHNHPSLANFVNTNLGRSFVGGNTMDVQGHGTHVAGTIASYGSVSGVMQSATLIPVKVLDNSGSGSLYGITQGILYAADIDADVINMSLGGGGYNQSMDEAVQTAVAQGTIVVAATGNDGASSISYPAAYSSVIAVGSVDINRVRSSFSNYGSGLEVMAPGSNIYSTYPNSRYTSLSGTSMATPHVAGVAGLIRAANPDIVVAQARQILRDTAQEAGSFTQYGYGIVDAHAAVVAASGGSGG

SEQ ID NO: 1065 - DNA, 1239 bp, synthetic construct
  misc_feature 1..1239: note = Variant of serine peptidase from Bacillus sinesaloumensis
  source 1..1239: mol_type = other DNA
atggcagatcaagctagtcaagctaatggaaaccaggacgtcattgaaggcgagctgatcgtttcagtggaaccgaagaacggtaaacctgatgtgagcattcaaagtgcacaatccgtaacagggcaggaagacgtccttaaatcgaaaggctttacgatcgttgataccttgcatgtagaggatagcagcgtcaagccactcgtctcgaagaatttcaataagaaagtggtggagaagatgggactggtgtatcttgttcaatactctccggaccagtttaaaagttccaacattgcgaagaaagaactcagaaaagaattgatggatctgggctttaaagtccgctatataagcgaaaattacaagatgatggcgatcgaaggtacagccactcttcagggggtgcaccctaaccaagtttggcattatgagatgattaaagctccggaagcgtgggctattacgtctggatccctgagcgttaaagtagcagtcctggatagcgggatcgaccataatcacccatccttggccaacttcgtgaatactaatcttggccgctcgtttgttggaggaaacaccatggatgttcaaggtcatggcacacatgttgctggcacgattgcatcttatgggagtgtaagcggagtgatgcagagtgcgacactgatcccggtcaaagtgctcgataattctggcagcgggtccctttacggtattacgcagggcatattgtatgccgccgacatcgatgcggacgtcattaacatgtctctgggtggaggaggctataatcagagcatggatgaggctgttcaaacagcagttgctcagggaaccattgtagtagcagcgactggcaatgatggtgcatcgtcgatcagttatcctgctgcctacagcagcgtcattgcggtgggatctgtggacagtaatcgtgttcgatcctcgttttctaactatggatctgggcttgaagttatggcaccgggcagcaacatctacagtacgtatcctaattccagatatacatctttgagtggtacaagcatggctactccgcacgttgcgggcgtagctgggctcattcgcgcagccaacccagacatagtggtcgcgcaagcccgtcagattctgcgggataccgcgcaagaagcaggatcgttcacacagtacggctatggaatcgtcgatgctcatgccgccgttgttgctgcatccggtggtagcggcggc

SEQ ID NO: 1066 - protein, 413 aa, synthetic construct
  REGION 1..413: note = Variant of serine peptidase from Bacillus sinesaloumensis
MADQASQANGNQDVIEGELIVSVEPKNGKPDVSIQSAQSVTGQEDVLKSKGFTIVDTLHVEDSSVKPLVSKNFNKKVVEKMGLVYLVQYSPDQFKSSNIAKKELRKELMDLGFKVRYISENYKMMAIEGTATLQGVHPNQVWHYEMIKAPEAWAITSGSLSVKVAVLDSGIDHNHPSLANFVNTNLGRSFVGGNTMDVQGHGTHVAGTIASYGSVSGVMQSATLIPVKVLDNSGSGSLYGITQGILYAADIDADVINMSLGGGGYNQSMDEAVQTAVAQGTIVVAATGNDGASSISYPAAYSSVIAVGSVDSNRVRSSFSNYGSGLEVMAPGSNIYSTYPNSRYTSLSGTSMATPHVAGVAGLIRAANPDIVVAQARQILRDTAQEAGSFTQYGYGIVDAHAAVVAASGGSGG

SEQ ID NO: 1067 - DNA, 1239 bp, synthetic construct
  misc_feature 1..1239: note = Variant of serine peptidase from Bacillus sinesaloumensis
  source 1..1239: mol_type = other DNA
atggcagatcaagctagtcaagctaatggaaaccaggacgtcattgaaggcgagctgatcgtttcagtggaaccgaagaacggtaaacctgatgtgagcattcaaagtgcacaatccgtaacagggcaggaagacgtccttaaatcgaaaggctttacgatcgttgataccttgcatgtagaggatagcagcgtcaagccactcgtctcgaagaatttcaataagaaagtggtggagaagatgggactggtgtatcttgttcaatactctccggaccagtttaaaagttccaacattgcgaagaaagaactcagaaaagaattgatggatctgggctttaaagtccgctatataagcgaaaattacaagatgatggcgatcgaaggtacagccactcttcagggggtgcacccttgtcaagtttgggcgtataatatgattaaagctccggaagcgtgggctattacgggtggatccctgagcgttaaagtagcagtcctggataccgggatcgaccataatcacccatccttggccaacttcgtgaatactaatcttggccgctcgtttgttggaggaaacaccatggatgttcaaggtcatggcacacatgttgctggcacgattgcatcttatgggagtgtaagcggagtgatgcagagtgcgacactgatcccggtcaaagtgctcgataattctggcagcgggtccctttacggtattacgcaaggcatattgtatgccgccgacatcgatgcggacgtcattaacatgtctctgggtggaggaggctataatcagagcatggatgaggctgttcaaacagcagttgctcagggaaccattgtagtagcagcgactggcaatgatggtgcatcgtcgatcagttatcctgctgcctacagcagcgtcattgcggtgggatctgtggacattaatcgtgttcgatcctcgttttctaactatggatctgggcttgaagtgatggcaccgggcagcaacatctacagtacgtatcctaattccagatatacatctttgagtggtacaagcatggctactccgcacgttgcgggcgtagctgggctcattcgcgcagccaacccagacatagtggtcgcgcaagcccgtcagattctgcgggataccgcgcaagaagcaggatcgttcacacagtacggctatggaatcgtcgatgctcatgccgccgttgttgctgcatccggtggtagcggcggc

SEQ ID NO: 1068 - protein, 413 aa, synthetic construct
  REGION 1..413: note = Variant of serine peptidase from Bacillus sinesaloumensis
MADQASQANGNQDVIEGELIVSVEPKNGKPDVSIQSAQSVTGQEDVLKSKGFTIVDTLHVEDSSVKPLVSKNFNKKVVEKMGLVYLVQYSPDQFKSSNIAKKELRKELMDLGFKVRYISENYKMMAIEGTATLQGVHPCQVWAYNMIKAPEAWAITGGSLSVKVAVLDTGIDHNHPSLANFVNTNLGRSFVGGNTMDVQGHGTHVAGTIASYGSVSGVMQSATLIPVKVLDNSGSGSLYGITQGILYAADIDADVINMSLGGGGYNQSMDEAVQTAVAQGTIVVAATGNDGASSISYPAAYSSVIAVGSVDINRVRSSFSNYGSGLEVMAPGSNIYSTYPNSRYTSLSGTSMATPHVAGVAGLIRAANPDIVVAQARQILRDTAQEAGSFTQYGYGIVDAHAAVVAASGGSGG

SEQ ID NO: 1069 - DNA, 1239 bp, synthetic construct
  misc_feature 1..1239: note = Variant of serine peptidase from Bacillus sinesaloumensis
  source 1..1239: mol_type = other DNA
atggcagatcaagctagtcaagctaatggaaaccaggacgtcattgaaggcgagctgatcgtttcagtggaaccgaagaacggtaaacctgatgtgagcattcaaagtgcacaatccgtaacagggcaggaagacgtccttaaatcgaaaggctttacgatcgttgataccttgcatgtagaggatagcagcgtcaagccactcgtctcgaagaatttcaataagaaagtggtggagaagatgggactgatgtatcttgttcaatactctccggaccagtttaaaagttccaacattgcgaagaaagaactcagaaaagaattgatggatctgggctttaaagtccgctatataagcgaaaattacaagatgatggcgatcgaaggtacagccactcttcagggggtgcacccttgtcaagtttgggcgtataatatgattaaagctccggaagcgtgggctattacgtctggatccctgagcgttaaagtagcagtcctggatacagggatcgaccataatcacccatccttggccaacttcgtgaatactaatcttggccgctcgtttgttggaggaaacaccatggatgttcaaggtcatggcacacatgttgctggcacgattgcatcttatgggagtgtaagcggagtgatgcagagtgcgacactgatcccggtcaaagtgctcgataattctggcagcgggtccctttacggtattacgcaaggcatattgtatgccgccgacatcgatgcggacgtcattaacatgtctctgggtgggggaggctataatcagagcatggatgaggctgttcaaacagcagttgctcagggaaccattgtagtagcagcgactggcaatgatggtgcatcgtcgatcagttatcctgctgcctacagcagcgtcattgcggtgggatctgtggactccaatcgtgttcgatcctcgttttctaactatggatctgggcttgaagtgatggcaccgggcagcaacatctacagtacgtatcctaattccagatatacatctttgagtggtacaagcatggctactccgcacgttgcgggcgtagctgggctcattcgcgcagccaacccagacatagtggtcgcgcaagcccgtcagattctgcgggataccgcgcaagaagcaggatcgttcacacagtacggctatggaatcgtcgatgctcatgccgccgttgttgctgcatccggtggtagcggcggc

SEQ ID NO: 1070 - protein, 413 aa, synthetic construct
  REGION 1..413: note = Variant of serine peptidase from Bacillus sinesaloumensis
MADQASQANGNQDVIEGELIVSVEPKNGKPDVSIQSAQSVTGQEDVLKSKGFTIVDTLHVEDSSVKPLVSKNFNKKVVEKMGLMYLVQYSPDQFKSSNIAKKELRKELMDLGFKVRYISENYKMMAIEGTATLQGVHPCQVWAYNMIKAPEAWAITSGSLSVKVAVLDTGIDHNHPSLANFVNTNLGRSFVGGNTMDVQGHGTHVAGTIASYGSVSGVMQSATLIPVKVLDNSGSGSLYGITQGILYAADIDADVINMSLGGGGYNQSMDEAVQTAVAQGTIVVAATGNDGASSISYPAAYSSVIAVGSVDSNRVRSSFSNYGSGLEVMAPGSNIYSTYPNSRYTSLSGTSMATPHVAGVAGLIRAANPDIVVAQARQILRDTAQEAGSFTQYGYGIVDAHAAVVAASGGSGG

SEQ ID NO: 1071 - DNA, 1239 bp, synthetic construct
  misc_feature 1..1239: note = Variant of serine peptidase from Bacillus sinesaloumensis
  source 1..1239: mol_type = other DNA
atggcagatcaagctagtcaagctaatggaaaccaggacgtcattgaaggcgagctgatcgtttcagtggaaccgaagaacggtaaacctgatgtgagcattcaaagtgcacaatccgtaacagggcaggaagacgtccttaaatcgaaaggctttacgatcgttgataccttgcatgtagaggatagcagcgtcaagccactcgtctcgaagaatttcaataagaaagtggtggagaagatgggactggtgtatcttgttcaatactctccggaccagtttaaaagttccaacattgcgaagaaagaactcagaaaagaattgatggatctgggctttaaagtccgctatataagcgaaaattacaagatgatggcgatcgaaggtacagccactcttcagggggtgcaccctaaccaagtttggcattatgagatgattaaagctccggaagcgtgggctattacgtctggatccctgagcgttaaagtagcagtcctggatacagggatcgaccataatcacccatccttggccaacttcgtgaatactaatcttggccgctcgtttgttggaggaaacaccatggatgttcaaggtcatggcacacatgttgctggcacgattgcatcttatgggagtgtaagcggagtgatgcagagtgcgacactgatcccggtcaaagtgctcgataattctggcagcgggtccctttacggtattacgcaaggcatattgtatgccgccgacatcgatgcggacgtcattaacatgtctctgggtggaggaggctataatcagagccaggatgaggctgttcaaacagcagttgctcagggaaccattgtagtagcagcgactggcaatgatggtgcatcgtcgatcagttatcctgctgcctacagcagcgtcattgcggtgggatctgtggacagtaatcgtgttcgatcctcgttttctaactatggatctgggcttgaagtgatggcaccgggcagcaacatctacagtacgtatcctaattccagatatacatctttgagtggtacaagcatggctactccgcacgttgcgggcgtagctgggctcattcgcgcagccaacccagacatagtggtcgcgcaagcccgtcagattctgcgggataccgcgcaagaagcaggatcgttcacacagtacggctatggaatcgtcgatgctcatgccgccgttgttgctgcatccggtggtagcggcggc

SEQ ID NO: 1072 - protein, 413 aa, synthetic construct
  REGION 1..413: note = Variant of serine peptidase from Bacillus sinesaloumensis
MADQASQANGNQDVIEGELIVSVEPKNGKPDVSIQSAQSVTGQEDVLKSKGFTIVDTLHVEDSSVKPLVSKNFNKKVVEKMGLVYLVQYSPDQFKSSNIAKKELRKELMDLGFKVRYISENYKMMAIEGTATLQGVHPNQVWHYEMIKAPEAWAITSGSLSVKVAVLDTGIDHNHPSLANFVNTNLGRSFVGGNTMDVQGHGTHVAGTIASYGSVSGVMQSATLIPVKVLDNSGSGSLYGITQGILYAADIDADVINMSLGGGGYNQSQDEAVQTAVAQGTIVVAATGNDGASSISYPAAYSSVIAVGSVDSNRVRSSFSNYGSGLEVMAPGSNIYSTYPNSRYTSLSGTSMATPHVAGVAGLIRAANPDIVVAQARQILRDTAQEAGSFTQYGYGIVDAHAAVVAASGGSGG

SEQ ID NO: 1073 - DNA, 1239 bp, synthetic construct
  misc_feature 1..1239: note = Variant of serine peptidase from Bacillus sinesaloumensis
  source 1..1239: mol_type = other DNA
atggcagatcaagctagtcaagctaatggaaaccaggacgtcattgaaggcgagctgatcgtttcagtggaaccgaagaacggtaaacctgatgtgagcattcaaagtgcacaatccgtaacagggcaggaagacgtccttaaatcgaaaggctttacgatcgttgataccttgcatgtagaggatagcagcgtcaagccactcgtctcgaagaatttcaataagaaagtggtggagaagatgggactggtgtatcttgttcaatactctccggaccagtttaaaagttccaacattgcgaagaaagaactcagaaaagaattgatggatctgggctttaaagtccgctatataagcgaaaattacaagatgatggcgatcgaaggtacagccactcttcagggggtgcaccctaaccaagtttgggcgtatgagatgattaaagctccggaagcgtgggctattacgggtggatccctgagcgttaaagtagcagtcctggatacagggatcgaccataatcacccatccttggccaacttcgtgaatactaatcttggccgctcgtttgttggaggaaacaccatggatgttcaaggtcatggcacacatgttgctggcacgattgcatcttatgggagtgtaagcggagtgatgcagagtgcgacactgatcccggtcaaagtgctcgataattctggcagcgggtccctttacggtattacgcaaggcatattgtatgccgccgacatcgatgcggacgtcattaacatgtctctgggtggaggaggctataatcagagccaggatgaggctgttcaaacagcagttgctcagggaaccattgtagtagcagcgactggcaatgatggtgcatcgtcgatcagttatcctgctgcctacagcagcgtcattgcggtgggatctgtggacattaatcgtgttcgatcctcgttttctaactatggatctgggcttgaactgatggcaccgggcagcaacatctacagtacgtatcctaattccagatatacatctttgagtggtacaagcatggctactccgcacgttgcgggcgtagctgggctcattcgcgcagccaacccagacatagtggtcgcgcaagcccgtcagattctgcgggataccgcgcaagaagcaggatcgttcacacagtacggctatggaatcgtcgatgctcatgccgccgttgttgctgcatccggtggtagcggcggc

SEQ ID NO: 1074 - protein, 413 aa, synthetic construct
  REGION 1..413: note = Variant of serine peptidase from Bacillus sinesaloumensis
MADQASQANGNQDVIEGELIVSVEPKNGKPDVSIQSAQSVTGQEDVLKSKGFTIVDTLHVEDSSVKPLVSKNFNKKVVEKMGLVYLVQYSPDQFKSSNIAKKELRKELMDLGFKVRYISENYKMMAIEGTATLQGVHPNQVWAYEMIKAPEAWAITGGSLSVKVAVLDTGIDHNHPSLANFVNTNLGRSFVGGNTMDVQGHGTHVAGTIASYGSVSGVMQSATLIPVKVLDNSGSGSLYGITQGILYAADIDADVINMSLGGGGYNQSQDEAVQTAVAQGTIVVAATGNDGASSISYPAAYSSVIAVGSVDINRVRSSFSNYGSGLELMAPGSNIYSTYPNSRYTSLSGTSMATPHVAGVAGLIRAANPDIVVAQARQILRDTAQEAGSFTQYGYGIVDAHAAVVAASGGSGG

SEQ ID NO: 1075 - DNA, 1239 bp, synthetic construct
  misc_feature 1..1239: note = Variant of serine peptidase from Bacillus sinesaloumensis
  source 1..1239: mol_type = other DNA
atggcagatcaagctagtcaagctaatggaaaccaggacgtcattgaaggcgagctgatcgtttcagtggaaccgaagaacggtaaacctgatgtgagcattcaaagtgcacaatccgtaacagggcaggaagacgtccttaaatcgaaaggctttacgatcgttgataccttgcatgtagaggatagcagcgtcaagccactcgtctcgaagaatttcaataagaaagtggtggagaagatgggactggtgtatcttgttcaatactctccggaccagtttaaaagttccaacattgcgaagaaagaactcagaaaagaattgatggatctgggctttaaagtccgctatataagcgaaaattacaagatgatggcgatcgaaggtacagccactcttcagggggtgcaccctaaccaagtttgggcgtatgagatgattaaagctccggaagcgtgggctattacgtctggatccctgagcgttaaagtagcagtcctggatacagggatcgaccataatcacccatccttggccaacttcgtgaatactaatcttggccgctcgtttgttggaggaaacaccatggatgttcaaggtcatggcacacatgttgctggcacgattgcatcttatgggagtgtaagcggagtgatgcagagtgcgacactgatcccggtcaaagtgctcgataattctggcagcgggtccctttacggtattacgcaaggcatattgtatgccgccgacatcgatgcggacgtcattaacatgtctctgggtgggggaggctataatcagagccaggatgaggctgttcaaacagcagttgctcagggaaccattgtagtagcagcgactggcaatgatggtgcatcgtcgatcagttatcctgctgcctacagcagcgtcattgcggtgggatctgtggacagtaatcgtgttcgatcctcgttttctaactatggatctgggcttgaagtgatggcaccgggcagcaacatctacagtacgtatcctaattccagatatacatctttgagtggtacaagcatggctactccgcacgttgcgggcgtagctgggctcattcgcgcagccaacccagacatagtggtcgcgcaagcccgtcagattctgcgggataccgcgcaagaagcaggatcgttcacacagtacggctatggaatcgtcgatgctcatgccgccgttgttgctgcatccggtggtagcggcggc

SEQ ID NO: 1076 - protein, 413 aa, synthetic construct
  REGION 1..413: note = Variant of serine peptidase from Bacillus sinesaloumensis
MADQASQANGNQDVIEGELIVSVEPKNGKPDVSIQSAQSVTGQEDVLKSKGFTIVDTLHVEDSSVKPLVSKNFNKKVVEKMGLVYLVQYSPDQFKSSNIAKKELRKELMDLGFKVRYISENYKMMAIEGTATLQGVHPNQVWAYEMIKAPEAWAITSGSLSVKVAVLDTGIDHNHPSLANFVNTNLGRSFVGGNTMDVQGHGTHVAGTIASYGSVSGVMQSATLIPVKVLDNSGSGSLYGITQGILYAADIDADVINMSLGGGGYNQSQDEAVQTAVAQGTIVVAATGNDGASSISYPAAYSSVIAVGSVDSNRVRSSFSNYGSGLEVMAPGSNIYSTYPNSRYTSLSGTSMATPHVAGVAGLIRAANPDIVVAQARQILRDTAQEAGSFTQYGYGIVDAHAAVVAASGGSGG

SEQ ID NO: 1077 - DNA, 1239 bp, synthetic construct
  misc_feature 1..1239: note = Variant of serine peptidase from Bacillus sinesaloumensis
  source 1..1239: mol_type = other DNA
atggcagatcaagctagtcaagctaatggaaaccaggacgtcattgaaggcgagctgatcgtttcagtggaaccgaagaacggtaaacctgatgtgagcattcaaagtgcacaatccgtaacagggcaggaagacgtccttaaatcgaaaggctttacgatcgttgataccttgcatgtagaggatagcagcgtcaagccactcgtctcgaagaatttcaataagaaagtggtggagaagatgggactggtgtatcttgttcaatactctccggaccagtttaaaagttccaacattgcgaagaaagaactcagaaaagaattgatggatctgggctttaaagtccgctatataagcgaaaattacaagatgatggcgatcgaaggtacagccactcttcagggggtgcaccctaaccaagtttggcattataatatgattaaagctccggaagcgtgggctattacgggtggatccctgagcgttaaagtagcagtcctggatacagggatcgaccataatcacccatccttggccaacttcgtgaatactaatcttggccgctcgtttgttggaggaaacaccatggatgttcaaggtcatggcacacatgttgctggcacgattgcatcttatgggagtgtaagcggagtgatgcagagtgcgacactgatcccggtcaaagtgctcgataattctggcagcgggtccctttacggtattacgcagggcatattgtatgccgccgacatcgatgcggacgtcattaacatgtctctgggtggaggaggctataatcagagcatggatgaggctgttcaaacagcagttgctcagggaaccattgtagtagcagcgactggcaatgatggtgcatcgtcgatcagttatcctgctgcctacagcagcgtcattgcggtgggatctgtggacagtaatcgtgttcgatcctcgttttctaactatggatctgggcttgaagtgatggcaccgggcagcaacatctacagtacgtatcctaattccagatatacatctttgagtggtacaagcatggctactccgcacgttgcgggcgtagctgggctcattcgcgcagccaacccagacatagtggtcgcgcaagcccgtcagattctgcgggataccgcgcaagaagcaggatcgttcacacagtacggctatggaatcgtcgatgctcatgccgccgttgttgctgcatccggtggtagcggcggc

SEQ ID NO: 1078 - protein, 413 aa, synthetic construct
  REGION 1..413: note = Variant of serine peptidase from Bacillus sinesaloumensis
MADQASQANGNQDVIEGELIVSVEPKNGKPDVSIQSAQSVTGQEDVLKSKGFTIVDTLHVEDSSVKPLVSKNFNKKVVEKMGLVYLVQYSPDQFKSSNIAKKELRKELMDLGFKVRYISENYKMMAIEGTATLQGVHPNQVWHYNMIKAPEAWAITGGSLSVKVAVLDTGIDHNHPSLANFVNTNLGRSFVGGNTMDVQGHGTHVAGTIASYGSVSGVMQSATLIPVKVLDNSGSGSLYGITQGILYAADIDADVINMSLGGGGYNQSMDEAVQTAVAQGTIVVAATGNDGASSISYPAAYSSVIAVGSVDSNRVRSSFSNYGSGLEVMAPGSNIYSTYPNSRYTSLSGTSMATPHVAGVAGLIRAANPDIVVAQARQILRDTAQEAGSFTQYGYGIVDAHAAVVAASGGSGG

SEQ ID NO: 1079 - DNA, 1239 bp, synthetic construct
  misc_feature 1..1239: note = Variant of serine peptidase from Bacillus sinesaloumensis
  source 1..1239: mol_type = other DNA
atggcagatcaagctagtcaagctaatggaaaccaggacgtcattgaaggcgagctgatcgtttcagtggaaccgaagaacggtaaacctgatgtgagcattcaaagtgcacaatccgtaacagggcaggaagacgtccttaaatcgaaaggctttacgatcgttgataccttgcatgtagaggatagcagcgtcaagccactcgtctcgaagaatttcaataagaaagtggtggagaagatgggactggtgtatcttgttcaatactctccggaccagtttaaaagttccaacattgcgaagaaagaactcagaaaagaattgatggatctgggctttaaagtccgctatataagcgaaaattacaagatgatggcgatcgaaggtacagccactcttcagggggtgcaccctctgcaagtttgggcgtataatatgattaaagctccggaagcgtgggctattacgtctggatccctgagcgttaaagtagcagtcctggatacagggatcgaccataatcacccatccttggccaacttcgtgaatactaatcttggccgctcgtttgttggaggaaacaccatggatgttcaaggtcatggcacacatgttgctggcacgattgcatcttatgggagtgtaagcggagtgatgcagagtgcgacactgatcccggtcaaagtgctcgataattctggcagcgggtccctttacggtattacgcaaggcatattgtatgccgccgacatcgatgcggacgtcattaacatgtctctgggtggaggaggctataatcagagcatggatgaggctgttcaaacagcagttgctcagggaaccattgtagtagcagcgactggcaatgatggtgcatcgtcgatcagttatcctgctgcctacagcagcgtcattgcggtgggatctgtggacattaatcgtgttcgatcctcgttttctaactatggatctgggcttgaagttatggcaccgggcagcaacatctacagtacgtatcctaattccagatatacatctttgagtggtacaagcatggctactccgcacgttgcgggcgtagctgggctcattcgcgcagccaacccagacatagtggtcgcgcaagcccgtcagattctgcgggataccgcgcaagaagcaggatcgttcacacagtacggctatggaatcgtcgatgctcatgccgccgttgttgctgcatccggtggtagcggcggc

SEQ ID NO: 1080 - protein, 413 aa, synthetic construct
  REGION 1..413: note = Variant of serine peptidase from Bacillus sinesaloumensis
MADQASQANGNQDVIEGELIVSVEPKNGKPDVSIQSAQSVTGQEDVLKSKGFTIVDTLHVEDSSVKPLVSKNFNKKVVEKMGLVYLVQYSPDQFKSSNIAKKELRKELMDLGFKVRYISENYKMMAIEGTATLQGVHPLQVWAYNMIKAPEAWAITSGSLSVKVAVLDTGIDHNHPSLANFVNTNLGRSFVGGNTMDVQGHGTHVAGTIASYGSVSGVMQSATLIPVKVLDNSGSGSLYGITQGILYAADIDADVINMSLGGGGYNQSMDEAVQTAVAQGTIVVAATGNDGASSISYPAAYSSVIAVGSVDINRVRSSFSNYGSGLEVMAPGSNIYSTYPNSRYTSLSGTSMATPHVAGVAGLIRAANPDIVVAQARQILRDTAQEAGSFTQYGYGIVDAHAAVVAASGGSGG

SEQ ID NO: 1081 - DNA, 1239 bp, synthetic construct
  misc_feature 1..1239: note = Variant of serine peptidase from Bacillus sinesaloumensis
  source 1..1239: mol_type = other DNA
atggcagatcaagctagtcaagctaatggaaaccaggacgtcattgaaggcgagctgatcgtttcagtggaaccgaagaacggtaaacctgatgtgagcattcaaagtgcacaatccgtaacagggcaggaagacgtccttaaatcgaaaggctttacgatcgttgataccttgcatgtagaggatagcagcgtcaagccactcgtctcgaagaatttcaataagaaagtggtggagaagatgggactggtgtatcttgttcaatactctccggaccagtttaaaagttccaacattgcgaagaaagaactcagaaaagaattgatggatctgggctttaaagtccgctatataagcgaaaattacaagatgatggcgatcgaaggtacagccactcttcagggggtgcaccctaaccaagtttggcattataatatgattaaagctccggaagcgtgggctattacgtctggatccctgagcgttaaagtagcagtcctggatacagggatcgaccataatcacccatccttggccaacttcgtgaatactaatcttggccgctcgtttgttggaggaaacaccatggatgttcaaggtcatggcacacatgttgctggcacgattgcatcttatgggagtgtaagcggagtgatgcagagtgcgacactgatcccggtcaaagtgctcgataattctggcagcgggtccctttacggtattacgcaaggcatattgtatgccgccgacatcgatgcggacgtccttaacatgtctctgggtggaggaggctataatcagagcatggatgaggctgttcaaacagcagttgctcagggaaccattgtagtagcagcgactggcaatgatggtgcatcgtcgatcagttatcctgctgcctacagcagcgtcattgcggtgggatctgtggactccaatcgtgttcgatcctcgttttctaactatggatctgggcttgaagttatggcaccgggcagcaacatctacagtacgtatcctaattccagatatacatctttgagtggtacaagcatggctactccgcacgttgcgggcgtagctgggctcattcgcgcagccaacccagacatagtggtcgcgcaagcccgtcagattctgcgggataccgcgcaagaagcaggatcgttcacacagtacggctatggaatcgtcgatgctcatgccgccgttgttgctgcatccggtggtagcggcggc

SEQ ID NO: 1082 - protein, 413 aa, synthetic construct
  REGION 1..413: note = Variant of serine peptidase from Bacillus sinesaloumensis
MADQASQANGNQDVIEGELIVSVEPKNGKPDVSIQSAQSVTGQEDVLKSKGFTIVDTLHVEDSSVKPLVSKNFNKKVVEKMGLVYLVQYSPDQFKSSNIAKKELRKELMDLGFKVRYISENYKMMAIEGTATLQGVHPNQVWHYNMIKAPEAWAITSGSLSVKVAVLDTGIDHNHPSLANFVNTNLGRSFVGGNTMDVQGHGTHVAGTIASYGSVSGVMQSATLIPVKVLDNSGSGSLYGITQGILYAADIDADVLNMSLGGGGYNQSMDEAVQTAVAQGTIVVAATGNDGASSISYPAAYSSVIAVGSVDSNRVRSSFSNYGSGLEVMAPGSNIYSTYPNSRYTSLSGTSMATPHVAGVAGLIRAANPDIVVAQARQILRDTAQEAGSFTQYGYGIVDAHAAVVAASGGSGG

SEQ ID NO: 1083 - DNA, 1239 bp, synthetic construct
  misc_feature 1..1239: note = Variant of serine peptidase from Bacillus sinesaloumensis
  source 1..1239: mol_type = other DNA
atggcagatcaagctagtcaagctaatggaaaccaggacgtcattgaaggcgagctgatcgtttcagtggaaccgaagaacggtaaacctgatgtgagcattcaaagtgcacaatccgtaacagggcaggaagacgtccttaaatcgaaaggctttacgatcgttgataccttgcatgtagaggatagcagcgtcaagccactcgtctcgaagaatttcaataagaaagtggtggagaagatgggactggtgtatcttgttcaatactctccggaccagtttaaaagttccaacattgcgaagaaagaactcagaaaagaattgatggatctgggctttaaagtccgctatataagcgaaaattacaagatgatggcgatcgaaggtacagccactcttcagggggtgcaccctaaccaagtttggcattataatatgattaaagctccggaagcgtgggctattacgtctggatccctgagcgttaaagtagcagtcctggatacagggatcgaccataatcacccatccttggccaacttcgtgaatactaatcttggccgctcgtttgttggaggaaacaccatggatgttcaaggtcatggcacacatgttgctggcacgattgcatcttatgggagtgtaagcggagtgatgcagagtgcgacactgatcccggtcaaagtgctcgataattctggcagcgggtccctttacggtattacgcaaggcatattgtatgccgccgacatcgatgcggacgtcattaacatgtctctgggtggaggaggctataatcagagcatggatgaggctgttcaaacagcagttgctcagggaaccattgtagtagcagcgactggcaatgatggtgcatcgtcgatcagttatcctgctgcctacagcagcgtcattgcggtgggatctgtggactccaatcgtgttcgatcctcgttttctaactatggatctgggcttgaagttatggcaccgggcagcaacatctacagtacgtatcctaattccagatatacatctttgagtggtacaagcatggctactccgcacgttgcgggcgtagctgggctcattcgcgcagccaacccagacatagtggtcgcgcaagcccgtcagattctgcgggataccgcgcaagaagcaggatcgttcacacagtacggctatggaatcgtcgatgctcatgccgccgttgttgctgcatccggtggtacgggcggc

SEQ ID NO: 1084 - protein, 413 aa, synthetic construct
  REGION 1..413: note = Variant of serine peptidase from Bacillus sinesaloumensis
MADQASQANGNQDVIEGELIVSVEPKNGKPDVSIQSAQSVTGQEDVLKSKGFTIVDTLHVEDSSVKPLVSKNFNKKVVEKMGLVYLVQYSPDQFKSSNIAKKELRKELMDLGFKVRYISENYKMMAIEGTATLQGVHPNQVWHYNMIKAPEAWAITSGSLSVKVAVLDTGIDHNHPSLANFVNTNLGRSFVGGNTMDVQGHGTHVAGTIASYGSVSGVMQSATLIPVKVLDNSGSGSLYGITQGILYAADIDADVINMSLGGGGYNQSMDEAVQTAVAQGTIVVAATGNDGASSISYPAAYSSVIAVGSVDSNRVRSSFSNYGSGLEVMAPGSNIYSTYPNSRYTSLSGTSMATPHVAGVAGLIRAANPDIVVAQARQILRDTAQEAGSFTQYGYGIVDAHAAVVAASGGTGG

SEQ ID NO: 1085 - DNA, 1239 bp, synthetic construct
  misc_feature 1..1239: note = Variant of serine peptidase from Bacillus sinesaloumensis
  source 1..1239: mol_type = other DNA
atggcagatcaagctagtcaagctaatggaaaccaggacgtcattgaaggcgagctgatcgtttcagtggaaccgaagaacggtaaacctgatgtgagcattcaaagtgcacaatccgtaacagggcaggaagacgtccttaaatcgaaaggctttacgatcgttgataccttgcatgtagaggatagcagcgtcaagccactcgtctcgaagaatttcaataagaaagtggtggagaagatgggactggtgtatcttgttcaatactctccggaccagtttaaaagttccaacattgcgaagaaagaactcagaaaagaattgatggatctgggctttaaagtccgctatataagcgaaaattacaagatgatggcgatcgaaggtacagccactcttcagggggtgcaccctaaccaagtttggcattataatatgattaaagctccggaagcgtgggctattacgtctggatccctgagcgttaaagtagcagtcctggatacagggatcgaccataatcacccatccttggccaacttcgtgaatactaatcttggccgctcgtttgttggaggaaacaccatggatgttcaaggtcatggcacacatgttgctggcacgattgcatcttatgggagtgtaagcggagtgatgcagagtgcgacactgatcccggtcaaagtgctcgataattctggcagcgggtccctttacggtattacgcaaggcatattgtatgccgccgacatcgatgcggacgtcattaacatgtctctgggtggaggaggctataatcagagcatggatgaggcttttcaaacagcagttgctcagggaaccattgtagtagcagcgactggcaatgatggtgcatcgtcgatcagttatcctgctgcctacagcagcgtcattgcggtgggatctgtggactccaatcgtgttcgatcctcgttttctaactatggatctgggcttgaagttatggcaccgggcagcaacatctacagtacgtatcctaattccagatatacatctttgagtggtacaagcatggctactccgcacgttgcgggcgtagctgggctcattcgcgcagccaacccagacatagtggtcgcgcaagcccgtcagattctgcgggataccgcgcaagaagcaggatcgttcacacagtacggctatggaatcgtcgatgctcatgccgccgttgttgctgcatccggtggtagcggcggc

SEQ ID NO: 1086 - protein, 413 aa, synthetic construct
  REGION 1..413: note = Variant of serine peptidase from Bacillus sinesaloumensis
MADQASQANGNQDVIEGELIVSVEPKNGKPDVSIQSAQSVTGQEDVLKSKGFTIVDTLHVEDSSVKPLVSKNFNKKVVEKMGLVYLVQYSPDQFKSSNIAKKELRKELMDLGFKVRYISENYKMMAIEGTATLQGVHPNQVWHYNMIKAPEAWAITSGSLSVKVAVLDTGIDHNHPSLANFVNTNLGRSFVGGNTMDVQGHGTHVAGTIASYGSVSGVMQSATLIPVKVLDNSGSGSLYGITQGILYAADIDADVINMSLGGGGYNQSMDEAFQTAVAQGTIVVAATGNDGASSISYPAAYSSVIAVGSVDSNRVRSSFSNYGSGLEVMAPGSNIYSTYPNSRYTSLSGTSMATPHVAGVAGLIRAANPDIVVAQARQILRDTAQEAGSFTQYGYGIVDAHAAVVAASGGSGG

SEQ ID NO: 1087 - DNA, 1239 bp, synthetic construct
  misc_feature 1..1239: note = Variant of serine peptidase from Bacillus sinesaloumensis
  source 1..1239: mol_type = other DNA
atggcagatcaagctagtcaagctaatggaaaccaggacgtcattgaaggcgagctgatcgtttcagtggaaccgaagaacggtaaacctgatgtgagcattcaaagtgcacaatccgtaacagggcaggaagacgtccttaaatcgaaaggctttacgatcgttgataccttgcatgtagaggatagcagcgtcaagccactcgtctcgaagaatttcaataagaaagtggtggagaagatgggactggtgtatcttgttcaatactctccggaccagtttaaaagttccaacattgcgaagaaagaactcagaaaagaattgatggatctgggctttaaagtccgctatataagcgaaaattacaagatgatggcgatcgaaggtacagccactcttcagggggtgcaccctaaccaagtttggcattataatatgattaaagctccggaagcgtgggctattacgtctggatccctgagcgttaaagtagcagtcctggatacagggatcgaccataatcacccatccttggccaacttcgtgaatactaatcttggccgctcgtttgttggaggaaacaccatggatgttcaaggtcatggcacacatgttgctggcacgattgcatcttatgggagtgtaagcggagtgatgcagagtgcgacactgatcccggtcaaagtgctcgataattctggcagcgggtccctttacggtattacgcaaggcatattgtatgccgccgacatcgatgcggacgtcattaacatgtctctgggtggaggaggctataatcagagcatggatgaggctgttcaaacagcagttgctcagggaaccattgtagtagcagcgactggcaatgatggtgcatcgtcgatcagttatcctgctgcctacagcagcgtcattgcggtgggatctgtggactccaatcgtgttcgatcctcgttttctaactatggatctgggcttgaagttatggcaccgggcagcaacatctacagtacgtatcctaattccagatatacatctttgagtggtacaagcatggctactccgcacgttgcgggcgtagctgggctcattcgcgcagccaacccagacatagtggtcgcgcaagcccgtcagattctgcgggataccgcgcaagaagcaggatcgttcacacagtacggctatggaatcgtcgatgctcatgccgccgttgttgctgcatccgagggtagcggcggc

SEQ ID NO: 1088 - protein, 413 aa, synthetic construct
  REGION 1..413: note = Variant of serine peptidase from Bacillus sinesaloumensis
MADQASQANGNQDVIEGELIVSVEPKNGKPDVSIQSAQSVTGQEDVLKSKGFTIVDTLHVEDSSVKPLVSKNFNKKVVEKMGLVYLVQYSPDQFKSSNIAKKELRKELMDLGFKVRYISENYKMMAIEGTATLQGVHPNQVWHYNMIKAPEAWAITSGSLSVKVAVLDTGIDHNHPSLANFVNTNLGRSFVGGNTMDVQGHGTHVAGTIASYGSVSGVMQSATLIPVKVLDNSGSGSLYGITQGILYAADIDADVINMSLGGGGYNQSMDEAVQTAVAQGTIVVAATGNDGASSISYPAAYSSVIAVGSVDSNRVRSSFSNYGSGLEVMAPGSNIYSTYPNSRYTSLSGTSMATPHVAGVAGLIRAANPDIVVAQARQILRDTAQEAGSFTQYGYGIVDAHAAVVAASEGSGG

SEQ ID NO: 1089 - DNA, 1239 bp, synthetic construct
  misc_feature 1..1239: note = Variant of serine peptidase from Bacillus sinesaloumensis
  source 1..1239: mol_type = other DNA
atggcagatcaagctagtcaagctaatggaaaccaggacgtcattgaaggcgagctgatcgtttcagtggaaccgaagaacggtaaacctgatgtgagcattcaaagtgcacaatccgtaacagggcaggaagacgtccttaaatcgaaaggctttacgatcgttgataccttgcatgtagaggatagcagcgtcaagccactcgtctcgaagaatttcaataagaaagtggtggagaagatgggactggtgtatcttgttcaatactctccggaccagtttaaaagttccaacattgcgaagaaagaactcagaaaagaattgatggatctgggctttaaagtccgctatataagcgaaaattacaagatgatggcgatcgaaggtacagccactcttcagggggtgcaccctaaccaagtttggcattataatatgattaaagctccggaagcgtgggctattacgtctggatccctgagcgttaaagtagcagtcctggatacagggatcgaccataatcacccatccttggccaacttcgtgaatactaatcttggccgctcgtttgttggaggaaacaccatggatgttcaaggtcatggcacacatgttgctggcacgattgcatcttatgggagtgtaagcggagtgatgcagagtgcgacactgatcccggtcaaagtgctcgataattctggcagcgggtccctttacggtattacgcaaggcatattgtatgccgccgacatcgatgcggacgtcattaacatgtctctgggtggaggaggctataatcagggtatggatgaggctgttcaaacagcagttgctcagggaaccattgtagtagcagcgactggcaatgatggtgcatcgtcgatcagttatcctgctgcctacagcagcgtcattgcggtgggatctgtggactccaatcgtgttcgatcctcgttttctaactatggatctgggcttgaagttatggcaccgggcagcaacatctacagtacgtatcctaattccagatatacatctttgagtggtacaagcatggctactccgcacgttgcgggcgtagctgggctcattcgcgcagccaacccagacatagtggtcgcgcaagcccgtcagattctgcgggataccgcgcaagaagcaggatcgttcacacagtacggctatggaatcgtcgatgctcatgccgccgttgttgctgcatccggtggtagcggcggc

SEQ ID NO: 1090 - protein, 413 aa, synthetic construct
  REGION 1..413: note = Variant of serine peptidase from Bacillus sinesaloumensis
MADQASQANGNQDVIEGELIVSVEPKNGKPDVSIQSAQSVTGQEDVLKSKGFTIVDTLHVEDSSVKPLVSKNFNKKVVEKMGLVYLVQYSPDQFKSSNIAKKELRKELMDLGFKVRYISENYKMMAIEGTATLQGVHPNQVWHYNMIKAPEAWAITSGSLSVKVAVLDTGIDHNHPSLANFVNTNLGRSFVGGNTMDVQGHGTHVAGTIASYGSVSGVMQSATLIPVKVLDNSGSGSLYGITQGILYAADIDADVINMSLGGGGYNQGMDEAVQTAVAQGTIVVAATGNDGASSISYPAAYSSVIAVGSVDSNRVRSSFSNYGSGLEVMAPGSNIYSTYPNSRYTSLSGTSMATPHVAGVAGLIRAANPDIVVAQARQILRDTAQEAGSFTQYGYGIVDAHAAVVAASGGSGG

SEQ ID NO: 1091 - DNA, 1239 bp, synthetic construct
  misc_feature 1..1239: note = Variant of serine peptidase from Bacillus sinesaloumensis
  source 1..1239: mol_type = other DNA
atggcagatcaagctagtcaagctaatggaaaccaggacgtcattgaaggcgagctgatcgtttcagtggaaccgaagaacggtaaacctgatgtgagcattcaaagtgcacaatccgtaacagggcaggaagacgtccttaaatcgaaaggctttacgatcgttgataccttgcatgtagaggatagcagcgtcaagccactcgtctcgaagaatttcaataagaaagtggtggagaagatgggactggtgtatcttgttcaatactctccggaccagtttaaaagttccaacattgcgaagaaagaactcagaaaagaattgatggatctgggctttaaagtccgctatataagcgaaaattacaagatgatggcgatcgaaggtacagccactcttcagggggtgcaccctaaccaagtttggcattataatatgattaaagctccggaagcgtgggctattacgtctggatccctgagcgttaaagtagcagtcctggatacagggatccagcataatcacccatccttggccaacttcgtgaatactaatcttggccgctcgtttgttggaggaaacaccatggatgttcaaggtcatggcacacatgttgctggcacgattgcatcttatgggagtgtaagcggagtgatgcagagtgcgacactgatcccggtcaaagtgctcgataattctggcagcgggtccctttacggtattacgcaaggcatattgtatgccgccgacatcgatgcggacgtcattaacatgtctctgggtggaggaggctataatcagagcatggatgaggctgttcaaacagcagttgctcagggaaccattgtagtagcagcgactggcaatgatggtgcatcgtcgatcagttatcctgctgcctacagcagcgtcattgcggtgggatctgtggactccaatcgtgttcgatcctcgttttctaactatggatctgggcttgaagttatggcaccgggcagcaacatctacagtacgtatcctaattccagatatacatctttgagtggtacaagcatggctactccgcacgttgcgggcgtagctgggctcattcgcgcagccaacccagacatagtggtcgcgcaagcccgtcagattctgcgggataccgcgcaagaagcaggatcgttcacacagtacggctatggaatcgtcgatgctcatgccgccgttgttgctgcatccggtggtagcggcggc

SEQ ID NO: 1092 - protein, 413 aa, synthetic construct
  REGION 1..413: note = Variant of serine peptidase from Bacillus sinesaloumensis
MADQASQANGNQDVIEGELIVSVEPKNGKPDVSIQSAQSVTGQEDVLKSKGFTIVDTLHVEDSSVKPLVSKNFNKKVVEKMGLVYLVQYSPDQFKSSNIAKKELRKELMDLGFKVRYISENYKMMAIEGTATLQGVHPNQVWHYNMIKAPEAWAITSGSLSVKVAVLDTGIQHNHPSLANFVNTNLGRSFVGGNTMDVQGHGTHVAGTIASYGSVSGVMQSATLIPVKVLDNSGSGSLYGITQGILYAADIDADVINMSLGGGGYNQSMDEAVQTAVAQGTIVVAATGNDGASSISYPAAYSSVIAVGSVDSNRVRSSFSNYGSGLEVMAPGSNIYSTYPNSRYTSLSGTSMATPHVAGVAGLIRAANPDIVVAQARQILRDTAQEAGSFTQYGYGIVDAHAAVVAASGGSGG

SEQ ID NO: 1093 - DNA, 1239 bp, synthetic construct
  misc_feature 1..1239: note = Variant of serine peptidase from Bacillus sinesaloumensis
  source 1..1239: mol_type = other DNA
atggcagatcaagctagtcaagctaatggaaaccaggacgtcattgaaggcgagctgatcgtttcagtggaaccgaagaacggtaaacctgatgtgagcattcaaagtgcacaatccgtaacagggcaggaagacgtccttaaatcgaaaggctttacgatcgttgataccttgcatgtagaggatagcagcgtcaagccactcgtctcgaagaatttcaataagaaagtggtggagaagatgggactggtgtatcttgttcaatactctccggaccagtttaaaagttccaacattgcgaagaaagaactcagaaaagaattgatggatctgggctttaaagtccgctatataagcgaaaattacaagatgatggcgatcgaaggtacagccactcttcagggggtgcaccctaaccaagtttggcattataatatgattaaagctccggaagcgtgggctattacgtctggatccctgagcgttaaagtagcagtcctggatacagggatcgaccataatcacccatccttggccaacttcgtgaatactaatcttggccgctcgtttgttggaggaaacaccatggatgttcaaggtcatggcacacatgttgctggcacgattgcatcttatgggagtgtaagcggagtgatgcagagtgcgacactgatcccggtcaaagtgctcgataattctggcagcgggtccctttacggtattacgcaaggcatattgtatgccgccgacatcgatgcggacgtcattaacatgtctctgggtggaggaggctataatcagagcatggatgaggctgttcaaacagcagttgctcagggaaccattgtagtagcagcgactggcaatgatggtgcatcgtcgatcagttatcctgctgcctacagcagcgtcattgcggtgggatctgtggactccaatcgtgttcgatcctcgttttctaactatggatctgggcttgaagttatggcaccgggcagcaacatctacagtacgtatcctaattccagatatacatctttgagtggtacaagcatggctactccgcacgttgcgggcgtagctgggctcattcgcgcagccaacccagacatagtggtcgcgcaagcccgtcagattctgcgggataccgcgcaagaagcaggatcgttcacacagtacggctatggaatcgtcgatgctcatgccgccgttgttgctgcatcccgtggtagcggcggc

SEQ ID NO: 1094 - protein, 413 aa, synthetic construct
  REGION 1..413: note = Variant of serine peptidase from Bacillus sinesaloumensis
MADQASQANGNQDVIEGELIVSVEPKNGKPDVSIQSAQSVTGQEDVLKSKGFTIVDTLHVEDSSVKPLVSKNFNKKVVEKMGLVYLVQYSPDQFKSSNIAKKELRKELMDLGFKVRYISENYKMMAIEGTATLQGVHPNQVWHYNMIKAPEAWAITSGSLSVKVAVLDTGIDHNHPSLANFVNTNLGRSFVGGNTMDVQGHGTHVAGTIASYGSVSGVMQSATLIPVKVLDNSGSGSLYGITQGILYAADIDADVINMSLGGGGYNQSMDEAVQTAVAQGTIVVAATGNDGASSISYPAAYSSVIAVGSVDSNRVRSSFSNYGSGLEVMAPGSNIYSTYPNSRYTSLSGTSMATPHVAGVAGLIRAANPDIVVAQARQILRDTAQEAGSFTQYGYGIVDAHAAVVAASRGSGG

SEQ ID NO: 1095 - DNA, 1239 bp, synthetic construct
  misc_feature 1..1239: note = Variant of serine peptidase from Bacillus sinesaloumensis
  source 1..1239: mol_type = other DNA
atggcagatcaagctagtcaagctaatggaaaccaggacgtcattgaaggcgagctgatcgtttcagtggaaccgaagaacggtaaacctgatgtgagcattcaaagtgcacaatccgtaacagggcaggaagacgtccttaaatcgaaaggctttacgatcgttgataccttgcatgtagaggatagcagcgtcaagccactcgtctcgaagaatttcaataagaaagtggtggagaagatgggactggtgtatcttgttcaatactctccggaccagtttaaaagttccaacattgcgaagaaagaactcagaaaagaattgatggatctgggctttaaagtccgctatataagcgaaaattacaagatgatggcgatcgaaggtacagccactcttcagggggtgcaccctaaccaagtttggcattataatatgattaaagctccggaagcgtgggctattacgtctggatccctgagcgttaaagtagcagtcctggatacagggatcgaccataatcacccatccttggccaacttcgtgaatactaatcttggccgctcgtttgttggaggaaacaccatggatgttcaaggtcatggcacacatgttgctggcacgattgcatcttatgggagtgtaagcggagtgatgcagagtgcgacactgatcccggtcaaagtgctcgataattctggcagcgggtccctttacggtattacgcaaggcatattgtatgccgccgacatcgatgcggacgtcattaacatgtctctgggtggaggaggctataatcagagcatggatgaggctgttcaaacagcagttgctcagggaaccattgtagtagcagcgactggcaatgatggtgcatcgtcgatcagttatcctgctgcctacagcagcgtcattgcggtgggatctgtggactccaatcgtgttcgatcctcgttttctaactatggatctgggcttgaagttatggcaccgggcagcaacatctacagtacgtatcctaattccagatatacatctttgagtggtacaagcatggctactccgcacgttgcgggcgtagctgggctcattcgcgcagccaacccagacatagtggtcgcgcaagcccgtcagattctgcgggataccgcgcaagaagcaggatcgttcacacagtacggctatggaatcgtcgatgctttggccgccgttgttgctgcatccggtggtagcggcggc

SEQ ID NO: 1096 - protein, 413 aa, synthetic construct
  REGION 1..413: note = Variant of serine peptidase from Bacillus sinesaloumensis
MADQASQANGNQDVIEGELIVSVEPKNGKPDVSIQSAQSVTGQEDVLKSKGFTIVDTLHVEDSSVKPLVSKNFNKKVVEKMGLVYLVQYSPDQFKSSNIAKKELRKELMDLGFKVRYISENYKMMAIEGTATLQGVHPNQVWHYNMIKAPEAWAITSGSLSVKVAVLDTGIDHNHPSLANFVNTNLGRSFVGGNTMDVQGHGTHVAGTIASYGSVSGVMQSATLIPVKVLDNSGSGSLYGITQGILYAADIDADVINMSLGGGGYNQSMDEAVQTAVAQGTIVVAATGNDGASSISYPAAYSSVIAVGSVDSNRVRSSFSNYGSGLEVMAPGSNIYSTYPNSRYTSLSGTSMATPHVAGVAGLIRAANPDIVVAQARQILRDTAQEAGSFTQYGYGIVDALAAVVAASGGSGG

SEQ ID NO: 1097 - DNA, 1239 bp, synthetic construct
  misc_feature 1..1239: note = Variant of serine peptidase from Bacillus sinesaloumensis
  source 1..1239: mol_type = other DNA
atggcagatcaagctagtcaagctaatggaaaccaggacgtcattgaaggcgagctgatcgtttcagtggaaccgaagaacggtaaacctgatgtgagcattcaaagtgcacaatccgtaacagggcaggaagacgtccttaaatcgaaaggctttacgatcgttgataccttgcatgtagaggatagcagcgtcaagccactcgtctcgaagaatttcaataagaaagtggtggagaagatgggactggtgtatcttgttcaatactctccggaccagtttaaaagttccaacattgcgaagaaagaactcagaaaagaattgatggatctgggctttaaagtccgctatataagcgaaaattacaagatgatggcgatcgaaggtacagccactcttcagggggtgcaccctaaccaagtttggcattataatatgattaaagctccggaagcgtgggctattacgtctggatccctgagcgttaaagtagcagtcctggatacagggatcgaccataatcacccatccttggccaacttcgtgaatactaatcttggccgctcgtttgttggaggaaacaccatggatgttcaaggtcatggcacacatgttgctggcacgattgcatcttatgggagtgtaagcggagtgatgcagagtgcgacactgatcccggtcaaagtgctcgataattctggcagcgggtccctttacggtattacgcaaggcatattgtatgccgccgacatcgatgcggacgtcattaacatgtctctgggtggaggaggctataatcagagcatggatgaggctgttcaaacagcagttgctcagggatgtattgtagtagcagcgactggcaatgatggtgcatcgtcgatcagttatcctgctgcctacagcagcgtcattgcggtgggatctgtggactccaatcgtgttcgatcctcgttttctaactatggatctgggcttgaagttatggcaccgggcagcaacatctacagtacgtatcctaattccagatatacatctttgagtggtacaagcatggctactccgcacgttgcgggcgtagctgggctcattcgcgcagccaacccagacatagtggtcgcgcaagcccgtcagattctgcgggataccgcgcaagaagcaggatcgttcacacagtacggctatggaatcgtcgatgctcatgccgccgttgttgctgcatccggtggtagcggcggc

SEQ ID NO: 1098 - protein, 413 aa, synthetic construct
  REGION 1..413: note = Variant of serine peptidase from Bacillus sinesaloumensis
MADQASQANGNQDVIEGELIVSVEPKNGKPDVSIQSAQSVTGQEDVLKSKGFTIVDTLHVEDSSVKPLVSKNFNKKVVEKMGLVYLVQYSPDQFKSSNIAKKELRKELMDLGFKVRYISENYKMMAIEGTATLQGVHPNQVWHYNMIKAPEAWAITSGSLSVKVAVLDTGIDHNHPSLANFVNTNLGRSFVGGNTMDVQGHGTHVAGTIASYGSVSGVMQSATLIPVKVLDNSGSGSLYGITQGILYAADIDADVINMSLGGGGYNQSMDEAVQTAVAQGCIVVAATGNDGASSISYPAAYSSVIAVGSVDSNRVRSSFSNYGSGLEVMAPGSNIYSTYPNSRYTSLSGTSMATPHVAGVAGLIRAANPDIVVAQARQILRDTAQEAGSFTQYGYGIVDAHAAVVAASGGSGG

SEQ ID NO: 1099 - DNA, 1239 bp, synthetic construct
  misc_feature 1..1239: note = Variant of serine peptidase from Bacillus sinesaloumensis
  source 1..1239: mol_type = other DNA
atggcagatcaagctagtcaagctaatggaaaccaggacgtcattgaaggcgagctgatcgtttcagtggaaccgaagaacggtaaacctgatgtgagcattcaaagtgcacaatccgtaacagggcaggaagacgtccttaaatcgaaaggctttacgatcgttgataccttgcatgtagaggatagcagcgtcaagccactcgtctcgaagaatttcaataagaaagtggtggagaagatgggactggtgtatcttgttcaatactctccggaccagtttaaaagttccaacattgcgaagaaagaactcagaaaagaattgatggatctgggctttaaagtccgctatataagcgaaaattacaagatgatggcgatcgaaggtacagccactcttcagggggtgcaccctaaccaagtttggcattataatatgattaaagctccggaagcgtgggctattacgtctggatccctgagcgttaaagtagcagtcctggatacagggatcgaccataatcacccatccttggccaacttcgtgaatactaatcttggccgctcgtttgttggaggaaacaccatggatgttcaaggtcatggcacacatgttgctggcacgattgcatcttatgggagtgtaagcggagtgatgcagagtgcgacactgatcccggtcaaagtgctcgataattctggcagcgggtccctttacggtattacgcaaggcatattgtatgccgccgacatcgatgcggacgtcattaacatgtctctgggtggaggaggctataatcagagcatggatgaggctgttcaaacagcagttgctcagggaaccattgtagtagcagcgactggcaatgatggtgcatcgtcgatcagttatcctgctgcctacagcagcgtcattgcggtgggatctgtggactccaatcgtgttcgatcctcgttttctaactatggatctgggcttgaagttatggcaccgggcagcaacatctacagtacgtatcctaattccagatatacatctttgagtggtacaagcatggctactccgcacgttgcgggcgtagctgggctcattcgcgcagccaacccagacatagtggtcgcgcaagcccgtcagattctgcgggataccgcgcaagaagcaggatcgttcacacagtacggctatggaatcgtcgatgctcatgccgccgttgttgctgcatccggttggagcggcggc

SEQ ID NO: 1100 - protein, 413 aa, synthetic construct
  REGION 1..413: note = Variant of serine peptidase from Bacillus sinesaloumensis
MADQASQANGNQDVIEGELIVSVEPKNGKPDVSIQSAQSVTGQEDVLKSKGFTIVDTLHVEDSSVKPLVSKNFNKKVVEKMGLVYLVQYSPDQFKSSNIAKKELRKELMDLGFKVRYISENYKMMAIEGTATLQGVHPNQVWHYNMIKAPEAWAITSGSLSVKVAVLDTGIDHNHPSLANFVNTNLGRSFVGGNTMDVQGHGTHVAGTIASYGSVSGVMQSATLIPVKVLDNSGSGSLYGITQGILYAADIDADVINMSLGGGGYNQSMDEAVQTAVAQGTIVVAATGNDGASSISYPAAYSSVIAVGSVDSNRVRSSFSNYGSGLEVMAPGSNIYSTYPNSRYTSLSGTSMATPHVAGVAGLIRAANPDIVVAQARQILRDTAQEAGSFTQYGYGIVDAHAAVVAASGWSGG

SEQ ID NO: 1101 - DNA, 1239 bp, synthetic construct
  misc_feature 1..1239: note = Variant of serine peptidase from Bacillus sinesaloumensis
  source 1..1239: mol_type = other DNA
atggcagatcaagctagtcaagctaatggaaaccaggacgtcattgaaggcgagctgatcgtttcagtggaaccgaagaacggtaaacctgatgtgagcattcaaagtgcacaatccgtaacagggcaggaagacgtccttaaatcgaaaggctttacgatcgttgataccttgcatgtagaggatagcagcgtcaagccactcgtctcgaagaatttcaataagaaagtggtggagaagatgggactggtgtatcttgttcaatactctccggaccagtttaaaagttccaacattgcgaagaaagaactcagaaaagaattgatggatctgggctttaaagtccgctatataagcgaaaattacaagatgatggcgatcgaaggtacagccactcttcagggggtgcaccctaaccaagtttggcattataatatgattaaagctccggaagcgtgggctattacgtctggatccctgagcgttaaagtagcagtcctggatacagggatcgaccataatcacccatccttggccaacttcgtgaatactaatcttggccgctcgtttgttggaggaaacaccatggatgttcaaggtcatggcacacatgttgctggcacgattgcatcttatgggagtgtaagcggagtgatgcagagtgcgacactgatcccggtcaaagtgctcgataattctggcagcgggtccctttacggtattacgcaaggcatattgtatgccgccgacatcgatgtggacgtcattaacatgtctctgggtggaggaggctataatcagagcatggatgaggctgttcaaacagcagttgctcagggaaccattgtagtagcagcgactggcaatgatggtgcatcgtcgatcagttatcctgctgcctacagcagcgtcattgcggtgggatctgtggactccaatcgtgttcgatcctcgttttctaactatggatctgggcttgaagttatggcaccgggcagcaacatctacagtacgtatcctaattccagatatacatctttgagtggtacaagcatggctactccgcacgttgcgggcgtagctgggctcattcgcgcagccaacccagacatagtggtcgcgcaagcccgtcagattctgcgggataccgcgcaagaagcaggatcgttcacacagtacggctatggaatcgtcgatgctcatgccgccgttgttgctgcatccggtggtagcggcggc

SEQ ID NO: 1102 - protein, 413 aa, synthetic construct
  REGION 1..413: note = Variant of serine peptidase from Bacillus sinesaloumensis
MADQASQANGNQDVIEGELIVSVEPKNGKPDVSIQSAQSVTGQEDVLKSKGFTIVDTLHVEDSSVKPLVSKNFNKKVVEKMGLVYLVQYSPDQFKSSNIAKKELRKELMDLGFKVRYISENYKMMAIEGTATLQGVHPNQVWHYNMIKAPEAWAITSGSLSVKVAVLDTGIDHNHPSLANFVNTNLGRSFVGGNTMDVQGHGTHVAGTIASYGSVSGVMQSATLIPVKVLDNSGSGSLYGITQGILYAADIDVDVINMSLGGGGYNQSMDEAVQTAVAQGTIVVAATGNDGASSISYPAAYSSVIAVGSVDSNRVRSSFSNYGSGLEVMAPGSNIYSTYPNSRYTSLSGTSMATPHVAGVAGLIRAANPDIVVAQARQILRDTAQEAGSFTQYGYGIVDAHAAVVAASGGSGG

SEQ ID NO: 1103 - DNA, 1239 bp, synthetic construct
  misc_feature 1..1239: note = Variant of serine peptidase from Bacillus sinesaloumensis
  source 1..1239: mol_type = other DNA
atggcagatcaagctagtcaagctaatggaaaccaggacgtcattgaaggcgagctgatcgtttcagtggaaccgaagaacggtaaacctgatgtgagcattcaaagtgcacaatccgtaacagggcaggaagacgtccttaaatcgaaaggctttacgatcgttgataccttgcatgtagaggatagcagcgtcaagccactcgtctcgaagaatttcaataagaaagtggtggagaagatgggactggtgtatcttgttcaatactctccggaccagtttaaaagttccaacattgcgaagaaagaactcagaaaagaattgatggatctgggctttaaagtccgctatataagcgaaaattacaagatgatggcgatcgaaggtacagccactcttcagggggtgcaccctaaccaagtttggcattataatatgattaaagctccggaagcgtgggctattacgtctggatccctgagcgttaaagtagcagtcctggatacagggatcgaccataatcacccatccttggccaacttcgtgaatactaatcttggccgctcgtttgttggaggaaacaccatggatgttcaaggtcatggcacacatgttgctggcacgattgcatcttatgggagtgtaagcggagtgatgcagagtgcgacactgatcccggtcaaagtgctcgataattctggcagcgggtccctttacggtattacgcaaggcatattgtatgccgccgacatcgatgcggacgtcattaacatgtctctgggtggaggaggctataatcagagcatggatgaggctgttcaaacagcagttgctcagggaaccattgtagtagcagcgactggcaatgatggtgcatcgtcgatcagttatcctgctgcctacagcagcgtcattgcggtgggatctgtggactccaatcgtgttcgatcctcgttttctaactatggatctgggcttgaagttatggcaccgggcagcaacatctacagtacgtatcctaattccagatatacatctttgagtggtacaagcatggctactccgcacgttgcgggcgtagctgggctcattcgcgcagccaacccagacatagtggtcgcgcaagcccgtcagattctgcgggataccgcgcaagaagcaggatcgttcacacagtacggctatggaatcgtcgatgctcatgccgccgttgttatggcatccggtggtagcggcggc

SEQ ID NO: 1104 - protein, 413 aa, synthetic construct
  REGION 1..413: note = Variant of serine peptidase from Bacillus sinesaloumensis
MADQASQANGNQDVIEGELIVSVEPKNGKPDVSIQSAQSVTGQEDVLKSKGFTIVDTLHVEDSSVKPLVSKNFNKKVVEKMGLVYLVQYSPDQFKSSNIAKKELRKELMDLGFKVRYISENYKMMAIEGTATLQGVHPNQVWHYNMIKAPEAWAITSGSLSVKVAVLDTGIDHNHPSLANFVNTNLGRSFVGGNTMDVQGHGTHVAGTIASYGSVSGVMQSATLIPVKVLDNSGSGSLYGITQGILYAADIDADVINMSLGGGGYNQSMDEAVQTAVAQGTIVVAATGNDGASSISYPAAYSSVIAVGSVDSNRVRSSFSNYGSGLEVMAPGSNIYSTYPNSRYTSLSGTSMATPHVAGVAGLIRAANPDIVVAQARQILRDTAQEAGSFTQYGYGIVDAHAAVVMASGGSGG

SEQ ID NO: 1105 - DNA, 1239 bp, synthetic construct
  misc_feature 1..1239: note = Variant of serine peptidase from Bacillus sinesaloumensis
  source 1..1239: mol_type = other DNA
atggcagatcaagctagtcaagctaatggaaaccaggacgtcattgaaggcgagctgatcgtttcagtggaaccgaagaacggtaaacctgatgtgagcattcaaagtgcacaatccgtaacagggcaggaagacgtccttaaatcgaaaggctttacgatcgttgataccttgcatgtagaggatagcagcgtcaagccactcgtctcgaagaatttcaataagaaagtggtggagaagatgggactggtgtatcttgttcaatactctccggaccagtttaaaagttccaacattgcgaagaaagaactcagaaaagaattgatggatctgggctttaaagtccgctatataagcgaaaattacaagatgatggcgatcgaaggtacagccactcttcagggggtgcaccctaaccaagtttggcattataatatgattaaagctccggaagcgtgggctattacgtctggatccctgagcgttaaagtagcagtcctggatacagggatcgaccataatcacccatccttggccaacttcgtgaatactaatcttggccgctcgtttgttggaggaaacaccatggatgttcaaggtcatggcacacatgttgctggcacgattgcatcttatgggagtgtaagcggagtgatgcagagtgcgacactgatcccggtcaaagtgctcgataattctggcagcgggtccctttacggtattacgcaaggcatattgtatgccgccgacatcgatgcggacgtcattaacatgtctctgggtggaggaggctataatcagagcatggatgaggctacgcaaacagcagttgctcagggaaccattgtagtagcagcgactggcaatgatggtgcatcgtcgatcagttatcctgctgcctacagcagcgtcattgcggtgggatctgtggactccaatcgtgttcgatcctcgttttctaactatggatctgggcttgaagttatggcaccgggcagcaacatctacagtacgtatcctaattccagatatacatctttgagtggtacaagcatggctactccgcacgttgcgggcgtagctgggctcattcgcgcagccaacccagacatagtggtcgcgcaagcccgtcagattctgcgggataccgcgcaagaagcaggatcgttcacacagtacggctatggaatcgtcgatgctcatgccgccgttgttgctgcatccggtggtagcggcggc

SEQ ID NO: 1106 - protein, 413 aa, synthetic construct
  REGION 1..413: note = Variant of serine peptidase from Bacillus sinesaloumensis
MADQASQANGNQDVIEGELIVSVEPKNGKPDVSIQSAQSVTGQEDVLKSKGFTIVDTLHVEDSSVKPLVSKNFNKKVVEKMGLVYLVQYSPDQFKSSNIAKKELRKELMDLGFKVRYISENYKMMAIEGTATLQGVHPNQVWHYNMIKAPEAWAITSGSLSVKVAVLDTGIDHNHPSLANFVNTNLGRSFVGGNTMDVQGHGTHVAGTIASYGSVSGVMQSATLIPVKVLDNSGSGSLYGITQGILYAADIDADVINMSLGGGGYNQSMDEATQTAVAQGTIVVAATGNDGASSISYPAAYSSVIAVGSVDSNRVRSSFSNYGSGLEVMAPGSNIYSTYPNSRYTSLSGTSMATPHVAGVAGLIRAANPDIVVAQARQILRDTAQEAGSFTQYGYGIVDAHAAVVAASGGSGG

SEQ ID NO: 1107 - DNA, 1239 bp, synthetic construct
  misc_feature 1..1239: note = Variant of serine peptidase from Bacillus sinesaloumensis
  source 1..1239: mol_type = other DNA
atggcagatcaagctagtcaagctaatggaaaccaggacgtcattgaaggcgagctgatcgtttcagtggaaccgaagaacggtaaacctgatgtgagcattcaaagtgcacaatccgtaacagggcaggaagacgtccttaaatcgaaaggctttacgatcgttgataccttgcatgtagaggatagcagcgtcaagccactcgtctcgaagaatttcaataagaaagtggtggagaagatgggactggtgtatcttgttcaatactctccggaccagtttaaaagttccaacattgcgaagaaagaactcagaaaagaattgatggatctgggctttaaagtccgctatataagcgaaaattacaagatgatggcgatcgaaggtacagccactcttcagggggtgcaccctaaccaagtttggcattataatatgattaaagctccggaagcgtgggctattacgtctggatccctgagcgttaaagtagcagtcctggatacagggatcgaccataatcacccatccttggccaacttcgtgaatactaatcttggccgctcgtttgttggaggaaacaccatggatgttcaaggtcatggcacacatgttgctggcacgattgcatcttatgggagtgtaagcggagtgatgcagagtgcgacactgatcccggtcaaagtgctcgataattctggcagcgggtccctttacggtattacgcaaggcatattgtatgccgccgacatcgatgcggacgtcattaacatgtctctgggtggaggaggctataatcagagcatggatgaggctgttcaaacagcagttgctcagggaaccattgtagtagcagcgactggcaatgatggtgcatcgtcgatcagttatcctgctgcctacagcagcgtcattgcggtgggatctgtggactccaatcgtgttcgatcctcgttttctaactatggatctgggcttgaagttatggcaccgggcagcaacatctacagtacgtatcctaattccagatatacatctttgagtggtacaagcatggctactccgcacgttgcgggcgtagctgggctcattcgcgcagccaacccagacatagtggtcgcgcaagcccgtcagattctgcgggataccgcgcaagaagcaggatcgttcacacagtacggctatggaatcgtcgatgctcatgccgccgttgttcgggcatccggtggtagcggcggc

SEQ ID NO: 1108 - protein, 413 aa, synthetic construct
  REGION 1..413: note = Variant of serine peptidase from Bacillus sinesaloumensis
MADQASQANGNQDVIEGELIVSVEPKNGKPDVSIQSAQSVTGQEDVLKSKGFTIVDTLHVEDSSVKPLVSKNFNKKVVEKMGLVYLVQYSPDQFKSSNIAKKELRKELMDLGFKVRYISENYKMMAIEGTATLQGVHPNQVWHYNMIKAPEAWAITSGSLSVKVAVLDTGIDHNHPSLANFVNTNLGRSFVGGNTMDVQGHGTHVAGTIASYGSVSGVMQSATLIPVKVLDNSGSGSLYGITQGILYAADIDADVINMSLGGGGYNQSMDEAVQTAVAQGTIVVAATGNDGASSISYPAAYSSVIAVGSVDSNRVRSSFSNYGSGLEVMAPGSNIYSTYPNSRYTSLSGTSMATPHVAGVAGLIRAANPDIVVAQARQILRDTAQEAGSFTQYGYGIVDAHAAVVRASGGSGG

SEQ ID NO: 1109 - DNA, 1239 bp, synthetic construct
  misc_feature 1..1239: note = Variant of serine peptidase from Bacillus sinesaloumensis
  source 1..1239: mol_type = other DNA
atggcagatcaagctagtcaagctaatggaaaccaggacgtcattgaaggcgagctgatcgtttcagtggaaccgaagaacggtaaacctgatgtgagcattcaaagtgcacaatccgtaacagggcaggaagacgtccttaaatcgaaaggctttacgatcgttgataccttgcatgtagaggatagcagcgtcaagccactcgtctcgaagaatttcaataagaaagtggtggagaagatgggactggtgtatcttgttcaatactctccggaccagtttaaaagttccaacattgcgaagaaagaactcagaaaagaattgatggatctgggctttaaagtccgctatataagcgaaaattacaagatgatggcgatcgaaggtacagccactcttcagggggtgcaccctaaccaagtttggcattataatatgattaaagctccggaagcgtgggctattacgtctggatccctgagcgttaaagtagcagtcctggatacagggatcgaccataatcacccatccttggccaacttcgtgaatactaatcttggccgctcgtttgttggaggaaacaccatggatgttcaaggtcatggcacacatgttgctggcacgattgcatcttatgggagtgtaagcggagtgatgcagagtgcgacactgatcccggtcaaagtgctcgataattctggcagcgggtccctttacggtattacgcaaggcatattgtatgccgccgacatcgatgcggacgtcatgaacatgtctctgggtggaggaggctataatcagagcatggatgaggctgttcaaacagcagttgctcagggaaccattgtagtagcagcgactggcaatgatggtgcatcgtcgatcagttatcctgctgcctacagcagcgtcattgcggtgggatctgtggactccaatcgtgttcgatcctcgttttctaactatggatctgggcttgaagttatggcaccgggcagcaacatctacagtacgtatcctaattccagatatacatctttgagtggtacaagcatggctactccgcacgttgcgggcgtagctgggctcattcgcgcagccaacccagacatagtggtcgcgcaagcccgtcagattctgcgggataccgcgcaagaagcaggatcgttcacacagtacggctatggaatcgtcgatgctcatgccgccgttgttgctgcatccggtggtagcggcggc

SEQ ID NO: 1110 - protein, 413 aa, synthetic construct
  REGION 1..413: note = Variant of serine peptidase from Bacillus sinesaloumensis
MADQASQANGNQDVIEGELIVSVEPKNGKPDVSIQSAQSVTGQEDVLKSKGFTIVDTLHVEDSSVKPLVSKNFNKKVVEKMGLVYLVQYSPDQFKSSNIAKKELRKELMDLGFKVRYISENYKMMAIEGTATLQGVHPNQVWHYNMIKAPEAWAITSGSLSVKVAVLDTGIDHNHPSLANFVNTNLGRSFVGGNTMDVQGHGTHVAGTIASYGSVSGVMQSATLIPVKVLDNSGSGSLYGITQGILYAADIDADVMNMSLGGGGYNQSMDEAVQTAVAQGTIVVAATGNDGASSISYPAAYSSVIAVGSVDSNRVRSSFSNYGSGLEVMAPGSNIYSTYPNSRYTSLSGTSMATPHVAGVAGLIRAANPDIVVAQARQILRDTAQEAGSFTQYGYGIVDAHAAVVAASGGSGG

SEQ ID NO: 1111 - DNA, 1239 bp, synthetic construct
  misc_feature 1..1239: note = Variant of serine peptidase from Bacillus sinesaloumensis
  source 1..1239: mol_type = other DNA
atggcagatcaagctagtcaagctaatggaaaccaggacgtcattgaaggcgagctgatcgtttcagtggaaccgaagaacggtaaacctgatgtgagcattcaaagtgcacaatccgtaacagggcaggaagacgtccttaaatcgaaaggctttacgatcgttgataccttgcatgtagaggatagcagcgtcaagccactcgtctcgaagaatttcaataagaaagtggtggagaagatgggactggtgtatcttgttcaatactctccggaccagtttaaaagttccaacattgcgaagaaagaactcagaaaagaattgatggatctgggctttaaagtccgctatataagcgaaaattacaagatgatggcgatcgaaggtacagccactcttcagggggtgcaccctaaccaagtttggcattataatatgattaaagctccggaagcgtgggctattacgtctggatccctgagcgttaaagtagcagtcctggatacagggatcgaccataatcacccatccttggccaacttcgtgaatactaatcttggccgctcgtttgttggaggaaacaccatggatgttcaaggtcatggcacacatgttgctggcacgattgcatcttatgggagtgtaagcggagtgatgcagagtgcgacactgatcccggtcaaagtgctcgataattctggcagcgggtccctttacggtattacgcaaggcatattgtatgccgccgacatcgatgcggacgtcattaacatgtctctgggtggaggaggctataatcagagcatggatgaggctgttcaaacagcagttgctcagggaaccattgtagtagcagcgactggcaatgatggtgcatcgtcgatcagttatcctgctgcctacagcagcgtcattgcggtgggatctgtggactccaatcgtgttcgatcctcgttttctaactatggatctgggcttgaagttatggcaccgggcagcaacatctacagtacgtatcctaattccagatatacatctttgagtggtacaagcatggctactccgcacgttgcgggcgtagctgggctcattcgcgcagccaacccagacatagtggtcgcgcaagcccgtcagattctgcgggataccgcgcaagaagcaggatcgttcacacagtacggctatggaatcgtcgatgctcatgccgccgttgttgctgcatccggtattagcggcggc

SEQ ID NO: 1112 - protein, 413 aa, synthetic construct
  REGION 1..413: note = Variant of serine peptidase from Bacillus sinesaloumensis
MADQASQANGNQDVIEGELIVSVEPKNGKPDVSIQSAQSVTGQEDVLKSKGFTIVDTLHVEDSSVKPLVSKNFNKKVVEKMGLVYLVQYSPDQFKSSNIAKKELRKELMDLGFKVRYISENYKMMAIEGTATLQGVHPNQVWHYNMIKAPEAWAITSGSLSVKVAVLDTGIDHNHPSLANFVNTNLGRSFVGGNTMDVQGHGTHVAGTIASYGSVSGVMQSATLIPVKVLDNSGSGSLYGITQGILYAADIDADVINMSLGGGGYNQSMDEAVQTAVAQGTIVVAATGNDGASSISYPAAYSSVIAVGSVDSNRVRSSFSNYGSGLEVMAPGSNIYSTYPNSRYTSLSGTSMATPHVAGVAGLIRAANPDIVVAQARQILRDTAQEAGSFTQYGYGIVDAHAAVVAASGISGG

SEQ ID NO: 1113 - DNA, 1239 bp, synthetic construct
  misc_feature 1..1239: note = Variant of serine peptidase from Bacillus sinesaloumensis
  source 1..1239: mol_type = other DNA
atggcagatcaagctagtcaagctaatggaaaccaggacgtcattgaaggcgagctgatcgtttcagtggaaccgaagaacggtaaacctgatgtgagcattcaaagtgcacaatccgtaacagggcaggaagacgtccttaaatcgaaaggctttacgatcgttgataccttgcatgtagaggatagcagcgtcaagccactcgtctcgaagaatttcaataagaaagtggtggagaagatgggactggtgtatcttgttcaatactctccggaccagtttaaaagttccaacattgcgaagaaagaactcagaaaagaattgatggatctgggctttaaagtccgctatataagcgaaaattacaagatgatggcgatcgaaggtacagccactcttcagggggtgcaccctaaccaagtttggcattataatatgattaaagctccggaagcgtgggctattacgtctggatccctgagcgttaaagtagcagtcctggatacagggatcgaccataatcacccatccttggccaacttcgtgaatactaatcttggccgctcgtttgttggaggaaacaccatggatgttcaaggtcatggcacacatgttgctggcacgattgcatcttatgggagtgtaagcggagtgatgcagagtgcgacactgatcccggtcaaagtgctcgataattctggcagcgggtccctttacggtattacgcaaggcatattgtatgccgccgacatcgatgcggacgtcattaacatgtctctgggtggaggaggctataatcagagcatggatgaggctatgcaaacagcagttgctcagggaaccattgtagtagcagcgactggcaatgatggtgcatcgtcgatcagttatcctgctgcctacagcagcgtcattgcggtgggatctgtggactccaatcgtgttcgatcctcgttttctaactatggatctgggcttgaagttatggcaccgggcagcaacatctacagtacgtatcctaattccagatatacatctttgagtggtacaagcatggctactccgcacgttgcgggcgtagctgggctcattcgcgcagccaacccagacatagtggtcgcgcaagcccgtcagattctgcgggataccgcgcaagaagcaggatcgttcacacagtacggctatggaatcgtcgatgctcatgccgccgttgttgctgcatccggtggtagcggcggc

SEQ ID NO: 1114 - protein, 413 aa, synthetic construct
  REGION 1..413: note = Variant of serine peptidase from Bacillus sinesaloumensis
MADQASQANGNQDVIEGELIVSVEPKNGKPDVSIQSAQSVTGQEDVLKSKGFTIVDTLHVEDSSVKPLVSKNFNKKVVEKMGLVYLVQYSPDQFKSSNIAKKELRKELMDLGFKVRYISENYKMMAIEGTATLQGVHPNQVWHYNMIKAPEAWAITSGSLSVKVAVLDTGIDHNHPSLANFVNTNLGRSFVGGNTMDVQGHGTHVAGTIASYGSVSGVMQSATLIPVKVLDNSGSGSLYGITQGILYAADIDADVINMSLGGGGYNQSMDEAMQTAVAQGTIVVAATGNDGASSISYPAAYSSVIAVGSVDSNRVRSSFSNYGSGLEVMAPGSNIYSTYPNSRYTSLSGTSMATPHVAGVAGLIRAANPDIVVAQARQILRDTAQEAGSFTQYGYGIVDAHAAVVAASGGSGG

SEQ ID NO: 1115 - DNA, 1239 bp, synthetic construct
  misc_feature 1..1239: note = Variant of serine peptidase from Bacillus sinesaloumensis
  source 1..1239: mol_type = other DNA
atggcagatcaagctagtcaagctaatggaaaccaggacgtcattgaaggcgagctgatcgtttcagtggaaccgaagaacggtaaacctgatgtgagcattcaaagtgcacaatccgtaacagggcaggaagacgtccttaaatcgaaaggctttacgatcgttgataccttgcatgtagaggatagcagcgtcaagccactcgtctcgaagaatttcaataagaaagtggtggagaagatgggactggtgtatcttgttcaatactctccggaccagtttaaaagttccaacattgcgaagaaagaactcagaaaagaattgatggatctgggctttaaagtccgctatataagcgaaaattacaagatgatggcgatcgaaggtacagccactcttcagggggtgcaccctaaccaagtttggcattataatatgattaaagctccggaagcgtgggctattacgtctggatccctgagcgttaaagtagcagtcctggatacagggatcgaccataatcacccatccttggccaacttcgtgaatactaatcttggccgctcgtttgttggaggaaacaccatggatgttcaaggtcatggcacacatgttgctggcacgattgcatcttatgggagtgtaagcggagtgatgcagagtgcgacactgatcccggtcaaagtgctcgataattctggcagcgggtccctttacggtattacgcaaggcatattgtatgccgccgacatcgatgcggacgtcattaacatgtctctgggtggaggaggctataatcagagcatggatgaggctttgcaaacagcagttgctcagggaaccattgtagtagcagcgactggcaatgatggtgcatcgtcgatcagttatcctgctgcctacagcagcgtcattgcggtgggatctgtggactccaatcgtgttcgatcctcgttttctaactatggatctgggcttgaagttatggcaccgggcagcaacatctacagtacgtatcctaattccagatatacatctttgagtggtacaagcatggctactccgcacgttgcgggcgtagctgggctcattcgcgcagccaacccagacatagtggtcgcgcaagcccgtcagattctgcgggataccgcgcaagaagcaggatcgttcacacagtacggctatggaatcgtcgatgctcatgccgccgttgttgctgcatccggtggtagcggcggc

SEQ ID NO: 1116 - protein, 413 aa, synthetic construct
  REGION 1..413: note = Variant of serine peptidase from Bacillus sinesaloumensis
MADQASQANGNQDVIEGELIVSVEPKNGKPDVSIQSAQSVTGQEDVLKSKGFTIVDTLHVEDSSVKPLVSKNFNKKVVEKMGLVYLVQYSPDQFKSSNIAKKELRKELMDLGFKVRYISENYKMMAIEGTATLQGVHPNQVWHYNMIKAPEAWAITSGSLSVKVAVLDTGIDHNHPSLANFVNTNLGRSFVGGNTMDVQGHGTHVAGTIASYGSVSGVMQSATLIPVKVLDNSGSGSLYGITQGILYAADIDADVINMSLGGGGYNQSMDEALQTAVAQGTIVVAATGNDGASSISYPAAYSSVIAVGSVDSNRVRSSFSNYGSGLEVMAPGSNIYSTYPNSRYTSLSGTSMATPHVAGVAGLIRAANPDIVVAQARQILRDTAQEAGSFTQYGYGIVDAHAAVVAASGGSGG

SEQ ID NO: 1117 - DNA, 1239 bp, synthetic construct
  misc_feature 1..1239: note = Variant of serine peptidase from Bacillus sinesaloumensis
  source 1..1239: mol_type = other DNA
atggcagatcaagctagtcaagctaatggaaaccaggacgtcattgaaggcgagctgatcgtttcagtggaaccgaagaacggtaaacctgatgtgagcattcaaagtgcacaatccgtaacagggcaggaagacgtccttaaatcgaaaggctttacgatcgttgataccttgcatgtagaggatagcagcgtcaagccactcgtctcgaagaatttcaataagaaagtggtggagaagatgggactggtgtatcttgttcaatactctccggaccagtttaaaagttccaacattgcgaagaaagaactcagaaaagaattgatggatctgggctttaaagtccgctatataagcgaaaattacaagatgatggcgatcgaaggtacagccactcttcagggggtgcaccctaaccaagtttgggcgtatgagatgattaaagctccggaagcgtgggctattacgtctggatccctgagcgttaaagtagcagtcctggatacagggatcgaccataatcacccatccttggccaacttcgtgaatactaatcttggccgctcgtttgttggaggaaacaccatggatgttcaaggtcatggcacacatgttgctggcacgattgcatcttatgggagtgtaagcggagtgatgcagagtgcgacactgatcccggtcaaagtgctcgataattctggcagcgggtccctttacggtattacgctgggcatattgtatgccgccgacatcgatgcggacgtcattaacatgtctctgggtggaggaggctataatcagagcatggatgaggctgttcaaacagcagttgctcagggaaccattgtagtagcagcgactggcaatgatggtgcatcgtcgatcagttatcctgctgcctacagcagcgtcattgcggtgggatctgtggactccaatcgtgttcgatcctcgttttctaactatggatctgggcttgaactgatggcaccgggcagcaacatctacagtacgtatcctaattccagatatacatctttgagtggtacaagcatggctactccgcacgttgcgggcgtagctgggctcattcgcgcagccaacccagacatagtggtcgcgcaagcccgtcagattctgcgggataccgcgcaagaagcaggatcgttcacacagtacggctatggaatcgtcgatgctcatgccgccgttgttgctgcatccggtggtagcggcggc

SEQ ID NO: 1118 - protein, 413 aa, synthetic construct
  REGION 1..413: note = Variant of serine peptidase from Bacillus sinesaloumensis
MADQASQANGNQDVIEGELIVSVEPKNGKPDVSIQSAQSVTGQEDVLKSKGFTIVDTLHVEDSSVKPLVSKNFNKKVVEKMGLVYLVQYSPDQFKSSNIAKKELRKELMDLGFKVRYISENYKMMAIEGTATLQGVHPNQVWAYEMIKAPEAWAITSGSLSVKVAVLDTGIDHNHPSLANFVNTNLGRSFVGGNTMDVQGHGTHVAGTIASYGSVSGVMQSATLIPVKVLDNSGSGSLYGITLGILYAADIDADVINMSLGGGGYNQSMDEAVQTAVAQGTIVVAATGNDGASSISYPAAYSSVIAVGSVDSNRVRSSFSNYGSGLELMAPGSNIYSTYPNSRYTSLSGTSMATPHVAGVAGLIRAANPDIVVAQARQILRDTAQEAGSFTQYGYGIVDAHAAVVAASGGSGG

SEQ ID NO: 1119 - DNA, 1239 bp, synthetic construct
  misc_feature 1..1239: note = Variant of serine peptidase from Bacillus sinesaloumensis
  source 1..1239: mol_type = other DNA
atggcagatcaagctagtcaagctaatggaaaccaggacgtcattgaaggcgagctgatcgtttcagtggaaccgaagaacggtaaacctgatgtgagcattcaaagtgcacaatccgtaacagggcaggaagacgtccttaaatcgaaaggctttacgatcgttgataccttgcatgtagaggatagcagcgtcaagccactcgtctcgaagaatttcaataagaaagtggtggagaagatgggactggtgtatcttgttcaatactctccggaccagtttaaaagttccaacattgcgaagaaagaactcagaaaagaattgatggatctgggctttaaagtccgctatataagcgaaaattacaagatgatggcgatcgaaggtacagccactcttcagggggtgcaccctaaccaagtttggcattatgagatgattaaagctccggaagcgtgggctattacgtctggatccctgagcgttaaagtagcagtcctggatacagggatcgaccataatcacccatccttggccaacttcgtgaatactaatcttggccgctcgtttgttggaggaaacaccatggatgttcaaggtcatggcacacatgttgctggcacgattgcatcttatgggagtgtaagcggagtgatgcagagtgcgacactgatcccggtcaaagtgctcgataattctggcagcgggtccctttacggtattacgcaaggcatattgtatgccgccgacatcgatgcggacgtcattaacatgtctctgggtggaggaggctataatcagagcatggatgaggctgttcaaacagcagttgctcagggaaccattgtagtagcagcgactggcaatgatggtgcatcgtcgatcagttatcctgctgcctacagcagcgtcattgcggtgggatctgtggactccaatcgtgttcgatcctcgttttctaactatggatctgggcttgaagtgatggcaccgggcagcaacatctacagtacgtatcctaattccagatatacatctttgagtggtacaagcatggctactccgcacgttgcgggcgtagctgggctcattcgcgcagccaacccagacatagtggtcgcgcaagcccgtcagattctgcgggataccgcgcaagaagcaggatcgttcacacagtacggctatggaatcgtcgatgctcatgccgccgttgttgctgcatccggtggtagcggcggc

SEQ ID NO: 1120 - protein, 413 aa, synthetic construct
  REGION 1..413: note = Variant of serine peptidase from Bacillus sinesaloumensis
MADQASQANGNQDVIEGELIVSVEPKNGKPDVSIQSAQSVTGQEDVLKSKGFTIVDTLHVEDSSVKPLVSKNFNKKVVEKMGLVYLVQYSPDQFKSSNIAKKELRKELMDLGFKVRYISENYKMMAIEGTATLQGVHPNQVWHYEMIKAPEAWAITSGSLSVKVAVLDTGIDHNHPSLANFVNTNLGRSFVGGNTMDVQGHGTHVAGTIASYGSVSGVMQSATLIPVKVLDNSGSGSLYGITQGILYAADIDADVINMSLGGGGYNQSMDEAVQTAVAQGTIVVAATGNDGASSISYPAAYSSVIAVGSVDSNRVRSSFSNYGSGLEVMAPGSNIYSTYPNSRYTSLSGTSMATPHVAGVAGLIRAANPDIVVAQARQILRDTAQEAGSFTQYGYGIVDAHAAVVAASGGSGG

SEQ ID NO: 1121 - DNA, 1239 bp, synthetic construct
  misc_feature 1..1239: note = Variant of serine peptidase from Bacillus sinesaloumensis
  source 1..1239: mol_type = other DNA
atggcagatcaagctagtcaagctaatggaaaccaggacgtcattgaaggcgagctgatcgtttcagtggaaccgaagaacggtaaacctgatgtgagcattcaaagtgcacaatccgtaacagggcaggaagacgtccttaaatcgaaaggctttacgatcgttgataccttgcatgtagaggatagcagcgtcaagccactcgtctcgaagaatttcaataagaaagtggtggagaagatgggactggtgtatcttgttcaatactctccggaccagtttaaaagttccaacattgcgaagaaagaactcagaaaagaattgatggatctgggctttaaagtccgctatataagcgaaaattacaagatgatggcgatcgaaggtacagccactcttcagggggtgcacccttgtcaagtttgggcgtatgagatgattaaagctccggaagcgtgggctattacgtctggatccctgagcgttaaagtagcagtcctggatacagggatcgaccataatcacccatccttggccaacttcgtgaatactaatcttggccgctcgtttgttggaggaaacaccatggatgttcaaggtcatggcacacatgttgctggcacgattgcatcttatgggagtgtaagcggagtgatgcagagtgcgacactgatcccggtcaaagtgctcgataattctggcagcgggtccctttacggtattacgcaaggcatattgtatgccgccgacatcgatgcggacgtcattaacatgtctctgggtgggggaggctataatcagagcatggatgaggctgttcaaacagcagttgctcagggaaccattgtagtagcagcgactggcaatgatggtgcatcgtcgatcagttatcctgctgcctacagcagcgtcattgcggtgggatctgtggacagtaatcgtgttcgatcctcgttttctaactatggatctgggcttgaactgatggcaccgggcagcaacatctacagtacgtatcctaatggcagatatcgcagtttgagtggtacaagcatggctactccgcacgttgcgggcgtagctgggctcattcgcgcagccaacccagacatagtggtcgcgcaagcccgtcagattctgcgggataccgcgcaagaagcaggatcgttcacacagtacggctatggaatcgtcgatgctcatgccgccgttgttgctgcatccggtggtagcggcggc

SEQ ID NO: 1122 - protein, 413 aa, synthetic construct
  REGION 1..413: note = Variant of serine peptidase from Bacillus sinesaloumensis
MADQASQANGNQDVIEGELIVSVEPKNGKPDVSIQSAQSVTGQEDVLKSKGFTIVDTLHVEDSSVKPLVSKNFNKKVVEKMGLVYLVQYSPDQFKSSNIAKKELRKELMDLGFKVRYISENYKMMAIEGTATLQGVHPCQVWAYEMIKAPEAWAITSGSLSVKVAVLDTGIDHNHPSLANFVNTNLGRSFVGGNTMDVQGHGTHVAGTIASYGSVSGVMQSATLIPVKVLDNSGSGSLYGITQGILYAADIDADVINMSLGGGGYNQSMDEAVQTAVAQGTIVVAATGNDGASSISYPAAYSSVIAVGSVDSNRVRSSFSNYGSGLELMAPGSNIYSTYPNGRYRSLSGTSMATPHVAGVAGLIRAANPDIVVAQARQILRDTAQEAGSFTQYGYGIVDAHAAVVAASGGSGG

SEQ ID NO: 1123 - DNA, 1239 bp, synthetic construct
  misc_feature 1..1239: note = Variant of serine peptidase from Bacillus sinesaloumensis
  source 1..1239: mol_type = other DNA
atggcagatcaagctagtcaagctaatggaaaccaggacgtcattgaaggcgagctgatcgtttcagtggaaccgaagaacggtaaacctgatgtgagcattcaaagtgcacaatccgtaacagggcaggaagacgtccttaaatcgaaaggctttacgatcgttgataccttgcatgtagaggatagcagcgtcaagccactcgtctcgaagaatttcaataagaaagtggtggagaagatgggactggtgtatcttgttcaatactctccggaccagtttaaaagttccaacattgcgaagaaagaactcagaaaagaattgatggatctgggctttaaagtccgctatataagcgaaaattacaagatgatggcgatcgaaggtacagccactcttcagggggtgcaccctctgcaagtttggcattatgagatgattaaagctccggaagcgtgggctattacgtctggatccctgagcgttaaagtagcagtcctggatacagggatcgaccataatcacccatccttggccaacttcgtgaatactaatcttggccgctcgtttgttggaggaaacaccatggatgttcaaggtcatggcacacatgttgctggcacgattgcatcttatgggagtgtaagcggagtgatgcagagtgcgacactgatcccggtcaaagtgctcgataattctggcagcgggtccctttacggtattacgcaaggcatattgtatgccgccgacatcgatgcggacgtcattaacatgtctctgggtggaggaggctataatcagagcatggatgaggctgttcaaacagcagttgctcagggaaccattgtagtagcagcgactggcaatgatggtgcatcgtcgatcagttatcctgctgcctacagcagcgtcattgcggtgggatctgtggactccaatcgtgttcgatcctcgttttctaactatggatctgggcttgaagttatggcaccgggcagcaacatctacagtacgtatcctaattccagatatacatctttgagtggtacaagcatggctactccgcacgttgcgggcgtagctgggctcattcgcgcagccaacccagacatagtggtcgcgcaagcccgtcagattctgcgggataccgcgcaagaagcaggatcgttcacacagtacggctatggaatcgtcgatgctcatgccgccgttgttgctgcatccggtggtagcggcggc

SEQ ID NO: 1124 - protein, 413 aa, synthetic construct
  REGION 1..413: note = Variant of serine peptidase from Bacillus sinesaloumensis
MADQASQANGNQDVIEGELIVSVEPKNGKPDVSIQSAQSVTGQEDVLKSKGFTIVDTLHVEDSSVKPLVSKNFNKKVVEKMGLVYLVQYSPDQFKSSNIAKKELRKELMDLGFKVRYISENYKMMAIEGTATLQGVHPLQVWHYEMIKAPEAWAITSGSLSVKVAVLDTGIDHNHPSLANFVNTNLGRSFVGGNTMDVQGHGTHVAGTIASYGSVSGVMQSATLIPVKVLDNSGSGSLYGITQGILYAADIDADVINMSLGGGGYNQSMDEAVQTAVAQGTIVVAATGNDGASSISYPAAYSSVIAVGSVDSNRVRSSFSNYGSGLEVMAPGSNIYSTYPNSRYTSLSGTSMATPHVAGVAGLIRAANPDIVVAQARQILRDTAQEAGSFTQYGYGIVDAHAAVVAASGGSGG

SEQ ID NO: 1125 - DNA, 1239 bp, synthetic construct
  misc_feature 1..1239: note = Variant of serine peptidase from Bacillus sinesaloumensis
  source 1..1239: mol_type = other DNA
atggcagatcaagctagtcaagctaatggaaaccaggacgtcattgaaggcgagctgatcgtttcagtggaaccgaagaacggtaaacctgatgtgagcattcaaagtgcacaatccgtaacagggcaggaagacgtccttaaatcgaaaggctttacgatcgttgataccttgcatgtagaggatagcagcgtcaagccactcgtctcgaagaatttcaataagaaagtggtggagaagatgggactggtgtatcttgttcaatactctccggaccagtttaaaagttccaacattgcgaagaaagaactcagaaaagaattgatggatctgggctttaaagtccgctatataagcgaaaattacaagatgatggcgatcgaaggtacagccactcttcagggggtgcaccctaaccaagtttgggcgtataatatgattaaagctccggaagcgtgggctattacgtctggatccctgagcgttaaagtagcagtcctggatacagggatcgaccataatcacccatccttggccaacttcgtgaatactaatcttggccgctcgtttgttggaggaaacaccatggatgttcaaggtcatggcacacatgttgctggcacgattgcatcttatgggagtgtaagcggagtgatgcagagtgcgacactgatcccggtcaaagtgctcgataattctggcagcgggtccctttacggtattacgcagggcatattgtatgccgccgacatcgatgcggacgtcattaacatgtctctgggtggaggaggctataatcagagcatggatgaggctgttcaaacagcagttgctcagggaaccattgtagtagcagcgactggcaatgatggtgcatcgtcgatcagttatcctgctgcctacagcagcgtcattgcggtgggatctgtggactccaatcgtgttcgatcctcgttttctaactatggatctgggcttgaactgatggcaccgggcagcaacatctacagtacgtatcctaatggcagatatcgcagtttgagtggtacaagcatggctactccgcacgttgcgggcgtagctgggctcattcgcgcagccaacccagacatagtggtcgcgcaagcccgtcagattctgcgggataccgcgcaagaagcaggatcgttcacacagtacggctatggaatcgtcgatgctcatgccgccgttgttgctgcatccggtggtagcggcggc

SEQ ID NO: 1126 - protein, 413 aa, synthetic construct
  REGION 1..413: note = Variant of serine peptidase from Bacillus sinesaloumensis
MADQASQANGNQDVIEGELIVSVEPKNGKPDVSIQSAQSVTGQEDVLKSKGFTIVDTLHVEDSSVKPLVSKNFNKKVVEKMGLVYLVQYSPDQFKSSNIAKKELRKELMDLGFKVRYISENYKMMAIEGTATLQGVHPNQVWAYNMIKAPEAWAITSGSLSVKVAVLDTGIDHNHPSLANFVNTNLGRSFVGGNTMDVQGHGTHVAGTIASYGSVSGVMQSATLIPVKVLDNSGSGSLYGITQGILYAADIDADVINMSLGGGGYNQSMDEAVQTAVAQGTIVVAATGNDGASSISYPAAYSSVIAVGSVDSNRVRSSFSNYGSGLELMAPGSNIYSTYPNGRYRSLSGTSMATPHVAGVAGLIRAANPDIVVAQARQILRDTAQEAGSFTQYGYGIVDAHAAVVAASGGSGG

SEQ ID NO: 1127 - DNA, 1239 bp, synthetic construct
  misc_feature 1..1239: note = Variant of serine peptidase from Bacillus sinesaloumensis
  source 1..1239: mol_type = other DNA
atggcagatcaagctagtcaagctaatggaaaccaggacgtcattgaaggcgagctgatcgtttcagtggaaccgaagaacggtaaacctgatgtgagcattcaaagtgcacaatccgtaacagggcaggaagacgtccttaaatcgaaaggctttacgatcgttgataccttgcatgtagaggatagcagcgtcaagccactcgtctcgaagaatttcaataagaaagtggtggagaagatgggactggtgtatcttgttcaatactctccggaccagtttaaaagttccaacattgcgaagaaagaactcagaaaagaattgatggatctgggctttaaagtccgctatataagcgaaaattacaagatgatggcgatcgaaggtacagccactcttcagggggtgcaccctaaccaagtttggcattatgagatgattaaagctccggaagcgtgggctattacgtctggatccctgagcgttaaagtagcagtcctggatacagggatcgaccataatcacccatccttggccaacttcgtgaatactaatcttggccgctcgtttgttggaggaaacaccatggatgttcaaggtcatggcacacatgttgctggcacgattgcatcttatgggagtgtaagcggagtgatgcagagtgcgacactgatcccggtcaaagtgctcgataattctggcagcgggtccctttacggtattacgcaaggcatattgtatgccgccgacatcgatgcggacgtcattaacatgtctctgggtggaggaggctataatcagagcatggatgaggctgttcaaacagcagttgctcagggaaccattgtagtagcagcgactggcaatgatggtgcatcgtcgatcagttatcctgctgcctacagcagcgtcattgcggtgggatctgtggactccaatcgtgttcgatcctcgttttctaactatggatctgggcttgaagttatggcaccgggcagcaacatctacagtacgtatcctaatggcagatatcgcagtttgagtggtacaagcatggctactccgcacgttgcgggcgtagctgggctcattcgcgcagccaacccagacatagtggtcgcgcaagcccgtcagattctgcgggataccgcgcaagaagcaggatcgttcacacagtacggctatggaatcgtcgatgctcatgccgccgttgttgctgcatccggtggtagcggcggc

SEQ ID NO: 1128 - protein, 413 aa, synthetic construct
  REGION 1..413: note = Variant of serine peptidase from Bacillus sinesaloumensis
MADQASQANGNQDVIEGELIVSVEPKNGKPDVSIQSAQSVTGQEDVLKSKGFTIVDTLHVEDSSVKPLVSKNFNKKVVEKMGLVYLVQYSPDQFKSSNIAKKELRKELMDLGFKVRYISENYKMMAIEGTATLQGVHPNQVWHYEMIKAPEAWAITSGSLSVKVAVLDTGIDHNHPSLANFVNTNLGRSFVGGNTMDVQGHGTHVAGTIASYGSVSGVMQSATLIPVKVLDNSGSGSLYGITQGILYAADIDADVINMSLGGGGYNQSMDEAVQTAVAQGTIVVAATGNDGASSISYPAAYSSVIAVGSVDSNRVRSSFSNYGSGLEVMAPGSNIYSTYPNGRYRSLSGTSMATPHVAGVAGLIRAANPDIVVAQARQILRDTAQEAGSFTQYGYGIVDAHAAVVAASGGSGG

SEQ ID NO: 1129 - DNA, 1239 bp, synthetic construct
  misc_feature 1..1239: note = Variant of serine peptidase from Bacillus sinesaloumensis
  source 1..1239: mol_type = other DNA
atggcagatcaagctagtcaagctaatggaaaccaggacgtcattgaaggcgagctgatcgtttcagtggaaccgaagaacggtaaacctgatgtgagcattcaaagtgcacaatccgtaacagggcaggaagacgtccttaaatcgaaaggctttacgatcgttgataccttgcatgtagaggatagcagcgtcaagccactcgtctcgaagaatttcaataagaaagtggtggagaagatgggactggtgtatcttgttcaatactctccggaccagtttaaaagttccaacattgcgaagaaagaactcagaaaagaattgatggatctgggctttaaagtccgctatataagcgaaaattacaagatgatggcgatcgaaggtacagccactcttcagggggtgcaccctaaccaagtttgggcgtataatatgattaaagctccggaagcgtgggctattacgagtggatccctgagcgttaaagtagcagtcctggatacagggatcgaccataatcacccatccttggccaacttcgtgaatactaatcttggccgctcgtttgttggaggaaacaccatggatgttcaaggtcatggcacacatgttgctggcacgattgcatcttatgggagtgtaagcggagtgatgcagagtgcgacactgatcccggtcaaagtgctcgataattctggcagcgggtccctttacggtattacgcaaggcatattgtatgccgccgacatcgatgcggacgtcattaacatgtctctgggtggaggaggctataatcagagcatggatgaggctgttcaaacagcagttgctcagggaaccattgtagtagcagcgactggcaatgatggtgcatcgtcgatcagttatcctgctgcctacagcagcgtcattgcggtgggatctgtggactccaatcgtgttcgatcctcgttttctaactatggatctgggcttgaagtgatggcaccgggcagcaacatctacagtacgtatcctaattccagatatacatctttgagtggtacaagcatggctactccgcacgttgcgggcgtagctgggctcattcgcgcagccaacccagacatagtggtcgcgcaagcccgtcagattctgcgggataccgcgcaagaagcaggatcgttcacacagtacggctatggaatcgtcgatgctcatgccgccgttgttgctgcatccggtggtagcggcggc

SEQ ID NO: 1130 - protein, 413 aa, synthetic construct
  REGION 1..413: note = Variant of serine peptidase from Bacillus sinesaloumensis
MADQASQANGNQDVIEGELIVSVEPKNGKPDVSIQSAQSVTGQEDVLKSKGFTIVDTLHVEDSSVKPLVSKNFNKKVVEKMGLVYLVQYSPDQFKSSNIAKKELRKELMDLGFKVRYISENYKMMAIEGTATLQGVHPNQVWAYNMIKAPEAWAITSGSLSVKVAVLDTGIDHNHPSLANFVNTNLGRSFVGGNTMDVQGHGTHVAGTIASYGSVSGVMQSATLIPVKVLDNSGSGSLYGITQGILYAADIDADVINMSLGGGGYNQSMDEAVQTAVAQGTIVVAATGNDGASSISYPAAYSSVIAVGSVDSNRVRSSFSNYGSGLEVMAPGSNIYSTYPNSRYTSLSGTSMATPHVAGVAGLIRAANPDIVVAQARQILRDTAQEAGSFTQYGYGIVDAHAAVVAASGGSGG

SEQ ID NO: 1131 - DNA, 1239 bp, synthetic construct
  misc_feature 1..1239: note = Variant of serine peptidase from Bacillus sinesaloumensis
  source 1..1239: mol_type = other DNA
atggcagatcaagctagtcaagctaatggaaaccaggacgtcattgaaggcgagctgatcgtttcagtggaaccgaagaacggtaaacctgatgtgagcattcaaagtgcacaatccgtaacagggcaggaagacgtccttaaatcgaaaggctttacgatcgttgataccttgcatgtagaggatagcagcgtcaagccactcgtctcgaagaatttcaataagaaagtggtggagaagatgggactggtgtatcttgttcaatactctccggaccagtttaaaagttccaacattgcgaagaaagaactcagaaaagaattgatggatctgggctttaaagtccgctatataagcgaaaattacaagatgatggcgatcgaaggtacagccactcttcagggggtgcacccttgtcaagtttgggcgtataatatgattaaagctccggaagcgtgggctattacgtctggatccctgagcgttaaagtagcagtcctggatacagggatcgaccataatcacccatccttggccaacttcgtgaatactaatcttggccgctcgtttgttggaggaaacaccatggatgttcaaggtcatggcacacatgttgctggcacgattgcatcttatgggagtgtaagcggagtgatgcagagtgcgacactgatcccggtcaaagtgctcgataattctggcagcgggtccctttacggtattacgcaaggcatattgtatgccgccgacatcgatgcggacgtcattaacatgtctctgggtggaggaggctataatcagagcatggatgaggctgttcaaacagcagttgctcagggaaccattgtagtagcagcgactggcaatgatggtgcatcgtcgatcagttatcctgctgcctacagcagcgtcattgcggtgggatctgtggactccaatcgtgttcgatcctcgttttctaactatggatctgggcttgaagttatggcaccgggcagcaacatctacagtacgtatcctaattccagatatacatctttgagtggtacaagcatggctactccgcacgttgcgggcgtagctgggctcattcgcgcagccaacccagacatagtggtcgcgcaagcccgtcagattctgcgggataccgcgcaagaagcaggatcgttcacacagtacggctatggaatcgtcgatgctcatgccgccgttgttgctgcatccggtggtagcggcggc

SEQ ID NO: 1132 - protein, 413 aa, synthetic construct
  REGION 1..413: note = Variant of serine peptidase from Bacillus sinesaloumensis
MADQASQANGNQDVIEGELIVSVEPKNGKPDVSIQSAQSVTGQEDVLKSKGFTIVDTLHVEDSSVKPLVSKNFNKKVVEKMGLVYLVQYSPDQFKSSNIAKKELRKELMDLGFKVRYISENYKMMAIEGTATLQGVHPCQVWAYNMIKAPEAWAITSGSLSVKVAVLDTGIDHNHPSLANFVNTNLGRSFVGGNTMDVQGHGTHVAGTIASYGSVSGVMQSATLIPVKVLDNSGSGSLYGITQGILYAADIDADVINMSLGGGGYNQSMDEAVQTAVAQGTIVVAATGNDGASSISYPAAYSSVIAVGSVDSNRVRSSFSNYGSGLEVMAPGSNIYSTYPNSRYTSLSGTSMATPHVAGVAGLIRAANPDIVVAQARQILRDTAQEAGSFTQYGYGIVDAHAAVVAASGGSGG

SEQ ID NO: 1133 - DNA, 1239 bp, synthetic construct
  misc_feature 1..1239: note = Variant of serine peptidase from Bacillus sinesaloumensis
  source 1..1239: mol_type = other DNA
atggcagatcaagctagtcaagctaatggaaaccaggacgtcattgaaggcgagctgatcgtttcagtggaaccgaagaacggtaaacctgatgtgagcattcaaagtgcacaatccgtaacagggcaggaagacgtccttaaatcgaaaggctttacgatcgttgataccttgcatgtagaggatagcagcgtcaagccactcgtctcgaagaatttcaataagaaagtggtggagaagatgggactggtgtatcttgttcaatactctccggaccagtttaaaagttccaacattgcgaagaaagaactcagaaaagaattgatggatctgggctttaaagtccgctatataagcgaaaattacaagatgatggcgatcgaaggtacagccactcttcagggggtgcacccttgtcaagtttggcattatgagatgattaaagctccggaagcgtgggctattacgagtggatccctgagcgttaaagtagcagtcctggatacagggatcgaccataatcacccatccttggccaacttcgtgaatactaatcttggccgctcgtttgttggaggaaacaccatggatgttcaaggtcatggcacacatgttgctggcacgattgcatcttatgggagtgtaagcggagtgatgcagagtgcgacactgatcccggtcaaagtgctcgataattctggcagcgggtccctttacggtattacgcaaggcatattgtatgccgccgacatcgatgcggacgtcattaacatgtctctgggtgggggaggctataatcagagcatggatgaggctgttcaaacagcagttgctcagggaaccattgtagtagcagcgactggcaatgatggtgcatcgtcgatcagttatcctgctgcctacagcagcgtcattgcggtgggatctgtggacagtaatcgtgttcgatcctcgttttctaactatggatctgggcttgaactgatggcaccgggcagcaacatctacagtacgtatcctaatggcagatatcgcagtttgagtggtacaagcatggctactccgcacgttgcgggcgtagctgggctcattcgcgcagccaacccagacatagtggtcgcgcaagcccgtcagattctgcgggataccgcgcaagaagcaggatcgttcacacagtacggctatggaatcgtcgatgctcatgccgccgttgttgctgcatccggtggtagcggcggc

SEQ ID NO: 1134 - protein, 413 aa, synthetic construct
  REGION 1..413: note = Variant of serine peptidase from Bacillus sinesaloumensis
MADQASQANGNQDVIEGELIVSVEPKNGKPDVSIQSAQSVTGQEDVLKSKGFTIVDTLHVEDSSVKPLVSKNFNKKVVEKMGLVYLVQYSPDQFKSSNIAKKELRKELMDLGFKVRYISENYKMMAIEGTATLQGVHPCQVWHYEMIKAPEAWAITSGSLSVKVAVLDTGIDHNHPSLANFVNTNLGRSFVGGNTMDVQGHGTHVAGTIASYGSVSGVMQSATLIPVKVLDNSGSGSLYGITQGILYAADIDADVINMSLGGGGYNQSMDEAVQTAVAQGTIVVAATGNDGASSISYPAAYSSVIAVGSVDSNRVRSSFSNYGSGLELMAPGSNIYSTYPNGRYRSLSGTSMATPHVAGVAGLIRAANPDIVVAQARQILRDTAQEAGSFTQYGYGIVDAHAAVVAASGGSGG

SEQ ID NO: 1135 - DNA, 1239 bp, synthetic construct
  misc_feature 1..1239: note = Variant of serine peptidase from Bacillus sinesaloumensis
  source 1..1239: mol_type = other DNA
atggcagatcaagctagtcaagctaatggaaaccaggacgtcattgaaggcgagctgatcgtttcagtggaaccgaagaacggtaaacctgatgtgagcattcaaagtgcacaatccgtaacagggcaggaagacgtccttaaatcgaaaggctttacgatcgttgataccttgcatgtagaggatagcagcgtcaagccactcgtctcgaagaatttcaataagaaagtggtggagaagatgggactggtgtatcttgttcaatactctccggaccagtttaaaagttccaacattgcgaagaaagaactcagaaaagaattgatggatctgggctttaaagtccgctatataagcgaaaattacaagatgatggcgatcgaaggtacagccactcttcagggggtgcaccctaaccaagtttgggcgtatgagatgattaaagctccggaagcgtgggctattacgagtggatccctgagcgttaaagtagcagtcctggatagcgggatcgaccataatcacccatccttggccaacttcgtgaatactaatcttggccgctcgtttgttggaggaaacaccatggatgttcaaggtcatggcacacatgttgctggcacgattgcatcttatgggagtgtaagcggagtgatgcagagtgcgacactgatcccggtcaaagtgctcgataattctggcagcgggtccctttacggtattacgcagggcatattgtatgccgccgacatcgatgcggacgtcattaacatgtctctgggtgggggaggctataatcagagcatggatgaggctgttcaaacagcagttgctcagggaaccattgtagtagcagcgactggcaatgatggtgcatcgtcgatcagttatcctgctgcctacagcagcgtcattgcggtgggatctgtggacattaatcgtgttcgatcctcgttttctaactatggatctgggcttgaactgatggcaccgggcagcaacatctacagtacgtatcctaatagcagatatcgcactttgagtggtacaagcatggctactccgcacgttgcgggcgtagctgggctcattcgcgcagccaacccagacatagtggtcgcgcaagcccgtcagattctgcgggataccgcgcaagaagcaggatcgttcacacagtacggctatggaatcgtcgatgctcatgccgccgttgttgctgcttccggtggtagcggcggc

SEQ ID NO: 1136 - protein, 413 aa, synthetic construct
  REGION 1..413: note = Variant of serine peptidase from Bacillus sinesaloumensis
MADQASQANGNQDVIEGELIVSVEPKNGKPDVSIQSAQSVTGQEDVLKSKGFTIVDTLHVEDSSVKPLVSKNFNKKVVEKMGLVYLVQYSPDQFKSSNIAKKELRKELMDLGFKVRYISENYKMMAIEGTATLQGVHPNQVWAYEMIKAPEAWAITSGSLSVKVAVLDSGIDHNHPSLANFVNTNLGRSFVGGNTMDVQGHGTHVAGTIASYGSVSGVMQSATLIPVKVLDNSGSGSLYGITQGILYAADIDADVINMSLGGGGYNQSMDEAVQTAVAQGTIVVAATGNDGASSISYPAAYSSVIAVGSVDINRVRSSFSNYGSGLELMAPGSNIYSTYPNSRYRTLSGTSMATPHVAGVAGLIRAANPDIVVAQARQILRDTAQEAGSFTQYGYGIVDAHAAVVAASGGSGG

SEQ ID NO: 1137 - DNA, 1239 bp, synthetic construct
  misc_feature 1..1239: note = Variant of serine peptidase from Bacillus sinesaloumensis
  source 1..1239: mol_type = other DNA
atggcagatcaagctagtcaagctaatggaaaccaggacgtcattgaaggcgagctgatcgtttcagtggaaccgaagaacggtaaacctgatgtgagcattcaaagtgcacaatccgtaacagggcaggaagacgtccttaaatcgaaaggctttacgatcgttgataccttgcatgtagaggatagcagcgtcaagccactcgtctcgaagaatttcaataagaaagtggtggagaagatgggactggtgtatcttgttcaatactctccggaccagtttaaaagttccaacattgcgaagaaagaactcagaaaagaattgatggatctgggctttaaagtccgctatataagcgaaaattacaagatgatggcgatcgaaggtacagccactcttcagggggtgcaccctaaccaagtttgggcgtataatatgattaaagctccggaagcgtgggctattacgtctggatccctgagcgttaaagtagcagtcctggatacagggatcgaccataatcacccatccttggccaacttcgtgaatactaatcttggccgctcgtttgttggaggaaacaccatggatgttcaaggtcatggcacacatgttgctggcacgattgcatcttatgggagtgtaagcggagtgatgcagagtgcgacactgatcccggtcaaagtgctcgataattctggcagcgggtccctttacggtattacgctgggcatattgtatgccgccgacatcgatgcggacgtcattaacatgtctctgggtgggggaggctataatcagagcatggatgaggctgttcaaacagcagttgctcagggaaccattgtagtagcagcgactggcaatgatggtgcatcgtcgatcagttatcctgctgcctacagcagcgtcattgcggtgggatctgtggacagtaatcgtgttcgatcctcgttttctaactatggatctgggcttgaactgatggcaccgggcagcaacatctacagtacgtatcctaatggcagatatcgcactttgagtggtacaagcatggctactccgcacgttgcgggcgtagctgggctcattcgcgcagccaacccagacatagtggtcgcgcaagcccgtcagattctgcgggataccgcgcaagaagcaggatcgttcacacagtacggctatggaatcgtcgatgctcatgccgccgttgttgctgcatccggtggtagcggcggc

SEQ ID NO: 1138 - protein, 413 aa, synthetic construct
  REGION 1..413: note = Variant of serine peptidase from Bacillus sinesaloumensis
MADQASQANGNQDVIEGELIVSVEPKNGKPDVSIQSAQSVTGQEDVLKSKGFTIVDTLHVEDSSVKPLVSKNFNKKVVEKMGLVYLVQYSPDQFKSSNIAKKELRKELMDLGFKVRYISENYKMMAIEGTATLQGVHPNQVWAYNMIKAPEAWAITSGSLSVKVAVLDTGIDHNHPSLANFVNTNLGRSFVGGNTMDVQGHGTHVAGTIASYGSVSGVMQSATLIPVKVLDNSGSGSLYGITLGILYAADIDADVINMSLGGGGYNQSMDEAVQTAVAQGTIVVAATGNDGASSISYPAAYSSVIAVGSVDSNRVRSSFSNYGSGLELMAPGSNIYSTYPNGRYRTLSGTSMATPHVAGVAGLIRAANPDIVVAQARQILRDTAQEAGSFTQYGYGIVDAHAAVVAASGGSGG

SEQ ID NO: 1139 - DNA, 1239 bp, synthetic construct
  misc_feature 1..1239: note = Variant of serine peptidase from Bacillus sinesaloumensis
  source 1..1239: mol_type = other DNA
atggcagatcaagctagtcaagctaatggaaaccaggacgtcattgaaggcgagctgatcgtttcagtggaaccgaagaacggtaaacctgatgtgagcattcaaagtgcacaatccgtaacagggcaggaagacgtccttaaatcgaaaggctttacgatcgttgataccttgcatgtagaggatagcagcgtcaagccactcgtctcgaagaatttcaataagaaagtggtggagaagatgggactggtgtatcttgttcaatactctccggaccagtttaaaagttccaacattgcgaagaaagaactcagaaaagaattgatggatctgggctttaaagtccgctatataagcgaaaattacaagatgatggcgatcgaaggtacagccactcttcagggggtgcacccttgtcaagtttgggcgtataatatgattaaagctccggaagcgtgggctattacgggtggatccctgagcgttaaagtagcagtcctggatagcgggatcgaccataatcacccatccttggccaacttcgtgaatactaatcttggccgctcgtttgttggaggaaacaccatggatgttcaaggtcatggcacacatgttgctggcacgattgcatcttatgggagtgtaagcggagtgatgcagagtgcgacactgatcccggtcaaagtgctcgataattctggcagcgggtccctttacggtattacgcagggcatattgtatgccgccgacatcgatgcggacgtcattaacatgtctctgggtggaggaggctataatcagagcatggatgaggctgttcaaacagcagttgctcagggaaccattgtagtagcagcgactggcaatgatggtgcatcgtcgatcagttatcctgctgcctacagcagcgtcattgcggtgggatctgtggacagtaatcgtgttcgatcctcgttttctaactatggatctgggcttgaactgatggcaccgggcagcaacatctacagtacgtatcctaattccagatatacgactttgagtggtacaagcatggctactccgcacgttgcgggcgtagctgggctcattcgcgcagccaacccagacatagtggtcgcgcaagcccgtcagattctgcgggataccgcgcaagaagcaggatcgttcacacagtacggctatggaatcgtcgatgctcatgccgccgttgttgctgcatccggtggtagcggcggc

SEQ ID NO: 1140 - protein, 413 aa, synthetic construct
  REGION 1..413: note = Variant of serine peptidase from Bacillus sinesaloumensis
MADQASQANGNQDVIEGELIVSVEPKNGKPDVSIQSAQSVTGQEDVLKSKGFTIVDTLHVEDSSVKPLVSKNFNKKVVEKMGLVYLVQYSPDQFKSSNIAKKELRKELMDLGFKVRYISENYKMMAIEGTATLQGVHPCQVWAYNMIKAPEAWAITGGSLSVKVAVLDSGIDHNHPSLANFVNTNLGRSFVGGNTMDVQGHGTHVAGTIASYGSVSGVMQSATLIPVKVLDNSGSGSLYGITQGILYAADIDADVINMSLGGGGYNQSMDEAVQTAVAQGTIVVAATGNDGASSISYPAAYSSVIAVGSVDSNRVRSSFSNYGSGLELMAPGSNIYSTYPNSRYTTLSGTSMATPHVAGVAGLIRAANPDIVVAQARQILRDTAQEAGSFTQYGYGIVDAHAAVVAASGGSGG

SEQ ID NO: 1141 - DNA, 1239 bp, synthetic construct
  misc_feature 1..1239: note = Variant of serine peptidase from Bacillus sinesaloumensis
  source 1..1239: mol_type = other DNA
atggcagatcaagctagtcaagctaatggaaaccaggacgtcattgaaggcgagctgatcgtttcagtggaaccgaagaacggtaaacctgatgtgagcattcaaagtgcacaatccgtaacagggcaggaagacgtccttaaatcgaaaggctttacgatcgttgataccttgcatgtagaggatagcagcgtcaagccactcgtctcgaagaatttcaataagaaagtggtggagaagatgggactggtgtatcttgttcaatactctccggaccagtttaaaagttccaacattgcgaagaaagaactcagaaaagaattgatggatctgggctttaaagtccgctatataagcgaaaattacaagatgatggcgatcgaaggtacagccactcttcagggggtgcaccctaaccaagtttgggcgtatgagatgattaaagctccggaagcgtgggctattgtaagtggatccctgagcgttaaagtagcagtcctggatacagggatcgaccataatcacccatccttggccaacttcgtgaatactaatcttggccgctcgtttgttggaggaaacaccatggatgttcaaggtcatggcacacatgttgctggcacgattgcatcttatgggagtgtaagcggagtgatgcagagtgcgacactgatcccggtcaaagtgctcgataattctggcagcgggtccctttacggtattacgcaaggcatattgtatgccgccgacatcgatgcggacgtcattaacatgtctctgggtgggggaggctataatcagagcatggatgaggctgttcaaacagcagttgctcagggaaccattgtagtagcagcgactggcaatgatggtgcatcgtcgatcagttatcctgctgcctacagcagcgtcattgcggtgggatctgtggacattaatcgtgttcgatcctcgttttctaactatggatctgggcttgaactgatggcaccgggcagcaacatctacagtacgtatcctaattccagatatacatctttgagtggtacaagcatggctactccgcacgttgcgggcgtagctgggctcattcgcgcagccaacccagacatagtggtcgcgcaagcccgtcagattctgcgggataccgcgcaagaagcaggatcgttcacacagtacggctatggaatcgtcgatgctcatgccgccgttgttgctgcatccggtggtagcggcggc

SEQ ID NO: 1142 - protein, 413 aa, synthetic construct
  REGION 1..413: note = Variant of serine peptidase from Bacillus sinesaloumensis
MADQASQANGNQDVIEGELIVSVEPKNGKPDVSIQSAQSVTGQEDVLKSKGFTIVDTLHVEDSSVKPLVSKNFNKKVVEKMGLVYLVQYSPDQFKSSNIAKKELRKELMDLGFKVRYISENYKMMAIEGTATLQGVHPNQVWAYEMIKAPEAWAIVSGSLSVKVAVLDTGIDHNHPSLANFVNTNLGRSFVGGNTMDVQGHGTHVAGTIASYGSVSGVMQSATLIPVKVLDNSGSGSLYGITQGILYAADIDADVINMSLGGGGYNQSMDEAVQTAVAQGTIVVAATGNDGASSISYPAAYSSVIAVGSVDINRVRSSFSNYGSGLELMAPGSNIYSTYPNSRYTSLSGTSMATPHVAGVAGLIRAANPDIVVAQARQILRDTAQEAGSFTQYGYGIVDAHAAVVAASGGSGG

SEQ ID NO: 1143 - DNA, 1239 bp, synthetic construct
  misc_feature 1..1239: note = Variant of serine peptidase from Bacillus sinesaloumensis
  source 1..1239: mol_type = other DNA
atggcagatcaagctagtcaagctaatggaaaccaggacgtcattgaaggcgagctgatcgtttcagtggaaccgaagaacggtaaacctgatgtgagcattcaaagtgcacaatccgtaacagggcaggaagacgtccttaaatcgaaaggctttacgatcgttgataccttgcatgtagaggatagcagcgtcaagccactcgtctcgaagaatttcaataagaaagtggtggagaagatgggactggtgtatcttgttcaatactctccggaccagtttaaaagttccaacattgcgaagaaagaactcagaaaagaattgatggatctgggctttaaagtccgctatataagcgaaaattacaagatgatggcgatcgaaggtacagccactcttcagggggtgcacccttgtcaagtttggcattatgagatgattaaagctccggaagcgtgggctattacgggtggatccctgagcgttaaagtagcagtcctggatacagggatcgaccataatcacccatccttggccaacttcgtgaatactaatcttggccgctcgtttgttggaggaaacaccatggatgttcaaggtcatggcacacatgttgctggcacgattgcatcttatgggagtgtaagcggagtgatgcagagtgcgacactgatcccggtcaaagtgctcgataattctggcagcgggtccctttacggtattacgcagggcatattgtatgccgccgacatcgatgcggacgtcattaacatgtctctgggtggaggaggctataatcagagcatggatgaggctgttcaaacagcagttgctcagggaaccattgtagtagcagcgactggcaatgatggtgcatcgtcgatcagttatcctgctgcctacagcagcgtcattgcggtgggatctgtggacattaatcgtgttcgatcctcgttttctaactatggatctgggcttgaactgatggcaccgggcagcaacatctacagtacgtatcctaattccagatatacatctttgagtggtacaagcatggctactccgcacgttgcgggcgtagctgggctcattcgcgcagccaacccagacatagtggtcgcgcaagcccgtcagattctgcgggataccgcgcaagaagcaggatcgttcacacagtacggctatggaatcgtcgatgctcatgccgccgttgttgctgcatccggtggtagcggcggc

SEQ ID NO: 1144 - protein, 413 aa, synthetic construct
  REGION 1..413: note = Variant of serine peptidase from Bacillus sinesaloumensis
MADQASQANGNQDVIEGELIVSVEPKNGKPDVSIQSAQSVTGQEDVLKSKGFTIVDTLHVEDSSVKPLVSKNFNKKVVEKMGLVYLVQYSPDQFKSSNIAKKELRKELMDLGFKVRYISENYKMMAIEGTATLQGVHPCQVWHYEMIKAPEAWAITGGSLSVKVAVLDTGIDHNHPSLANFVNTNLGRSFVGGNTMDVQGHGTHVAGTIASYGSVSGVMQSATLIPVKVLDNSGSGSLYGITQGILYAADIDADVINMSLGGGGYNQSMDEAVQTAVAQGTIVVAATGNDGASSISYPAAYSSVIAVGSVDINRVRSSFSNYGSGLELMAPGSNIYSTYPNSRYTSLSGTSMATPHVAGVAGLIRAANPDIVVAQARQILRDTAQEAGSFTQYGYGIVDAHAAVVAASGGSGG

SEQ ID NO: 1145 - DNA, 1239 bp, synthetic construct
  misc_feature 1..1239: note = Variant of serine peptidase from Bacillus sinesaloumensis
  source 1..1239: mol_type = other DNA
atggcagatcaagctagtcaagctaatggaaaccaggacgtcattgaaggcgagctgatcgtttcagtggaaccgaagaacggtaaacctgatgtgagcattcaaagtgcacaatccgtaacagggcaggaagacgtccttaaatcgaaaggctttacgatcgttgataccttgcatgtagaggatagcagcgtcaagccactcgtctcgaagaatttcaataagaaagtggtggagaagatgggactggtgtatcttgttcaatactctccggaccagtttaaaagttccaacattgcgaagaaagaactcagaaaagaattgatggatctgggctttaaagtccgctatataagcgaaaattacaagatgatggcgatcgaaggtacagccactcttcagggggtgcaccctaaccaagtttgggcgtataatatgattaaagctccggaagcgtgggctattacgtctggatccctgagcgttaaagtagcagtcctggatacagggatcgaccataatcacccatccttggccaacttcgtgaatactaatcttggccgctcgtttgttggaggaaacaccatggatgttcaaggtcatggcacacatgttgctggcacgattgcatcttatgggagtgtaagcggagtgatgcagagtgcgacactgatcccggtcaaagtgctcgataattctggcagcgggtccctttacggtattacgcagggcatattgtatgccgccgacatcgatgcggacgtcattaacatgtctctgggtggaggaggctataatcagagcatggatgaggctgttcaaacagcagttgctcagggaaccattgtagtagcagcgactggcaatgatggtgcatcgtcgatcagttatcctgctgcctacagcagcgtcattgcggtgggatctgtggacagtaatcgtgttcgatcctcgttttctaactatggatctgggcttgaactgatggcaccgggcagcaacatctacagtacgtatcctaatggcagatatcgcactttgagtggtacaagcatggctactccgcacgttgcgggcgtagctgggctcattcgcgcagccaacccagacatagtggtcgcgcaagcccgtcagattctgcgggataccgcgcaagaagcaggatcgttcacacagtacggctatggaatcgtcgatgctcatgccgccgttgttgctgcatccggtggtagcggcggc

SEQ ID NO: 1146 - protein, 413 aa, synthetic construct
  REGION 1..413: note = Variant of serine peptidase from Bacillus sinesaloumensis
MADQASQANGNQDVIEGELIVSVEPKNGKPDVSIQSAQSVTGQEDVLKSKGFTIVDTLHVEDSSVKPLVSKNFNKKVVEKMGLVYLVQYSPDQFKSSNIAKKELRKELMDLGFKVRYISENYKMMAIEGTATLQGVHPNQVWAYNMIKAPEAWAITSGSLSVKVAVLDTGIDHNHPSLANFVNTNLGRSFVGGNTMDVQGHGTHVAGTIASYGSVSGVMQSATLIPVKVLDNSGSGSLYGITQGILYAADIDADVINMSLGGGGYNQSMDEAVQTAVAQGTIVVAATGNDGASSISYPAAYSSVIAVGSVDSNRVRSSFSNYGSGLELMAPGSNIYSTYPNGRYRTLSGTSMATPHVAGVAGLIRAANPDIVVAQARQILRDTAQEAGSFTQYGYGIVDAHAAVVAASGGSGG

SEQ ID NO: 1147 - DNA, 1239 bp, synthetic construct
  misc_feature 1..1239: note = Variant of serine peptidase from Bacillus sinesaloumensis
  source 1..1239: mol_type = other DNA
atggcagatcaagctagtcaagctaatggaaaccaggacgtcattgaaggcgagctgatcgtttcagtggaaccgaagaacggtaaacctgatgtgagcattcaaagtgcacaatccgtaacagggcaggaagacgtccttaaatcgaaaggctttacgatcgttgataccttgcatgtagaggatagcagcgtcaagccactcgtctcgaagaatttcaataagaaagtggtggagaagatgggactggtgtatcttgttcaatactctccggaccagtttaaaagttccaacattgcgaagaaagaactcagaaaagaattgatggatctgggctttaaagtccgctatataagcgaaaattacaagatgatggcgatcgaaggtacagccactcttcagggggtgcacccttgtcaagtttgggcgtataatatgattaaagctccggaagcgtgggctattacgtctggatccctgagcgttaaagtagcagtcctggatacagggatcgaccataatcacccatccttggccaacttcgtgaatactaatcttggccgctcgtttgttggaggaaacaccatggatgttcaaggtcatggcacacatgttgctggcacgattgcatcttatgggagtgtaagcggagtgatgcagagtgcgacactgatcccggtcaaagtgctcgataattctggcagcgggtccctttacggtattacgcagggcatattgtatgccgccgacatcgatgcggacgtcattaacatgtctctgggtgggggaggctataatcagagcatggatgaggctgttcaaacagcagttgctcagggaaccattgtagtagcagcgactggcaatgatggtgcatcgtcgatcagttatcctgctgcctacagcagcgtcattgcggtgggatctgtggacagtaatcgtgttcgatcctcgttttctaactatggatctgggcttgaactgatggcaccgggcagcaacatctacagtacgtatcctaattccagatatacatctttgagtggtacaagcatggctactccgcacgttgcgggcgtagctgggctcattcgcgcagccaacccagacatagtggtcgcgcaagcccgtcagattctgcgggataccgcgcaagaagcaggatcgttcacacagtacggctatggaatcgtcgatgctcatgccgccgttgttgctgcatccggtggtagcggcggc

SEQ ID NO: 1148 - protein, 413 aa, synthetic construct
  REGION 1..413: note = Variant of serine peptidase from Bacillus sinesaloumensis
MADQASQANGNQDVIEGELIVSVEPKNGKPDVSIQSAQSVTGQEDVLKSKGFTIVDTLHVEDSSVKPLVSKNFNKKVVEKMGLVYLVQYSPDQFKSSNIAKKELRKELMDLGFKVRYISENYKMMAIEGTATLQGVHPCQVWAYNMIKAPEAWAITSGSLSVKVAVLDTGIDHNHPSLANFVNTNLGRSFVGGNTMDVQGHGTHVAGTIASYGSVSGVMQSATLIPVKVLDNSGSGSLYGITQGILYAADIDADVINMSLGGGGYNQSMDEAVQTAVAQGTIVVAATGNDGASSISYPAAYSSVIAVGSVDSNRVRSSFSNYGSGLELMAPGSNIYSTYPNSRYTSLSGTSMATPHVAGVAGLIRAANPDIVVAQARQILRDTAQEAGSFTQYGYGIVDAHAAVVAASGGSGG

SEQ ID NO: 1149 - DNA, 1239 bp, synthetic construct
  misc_feature 1..1239: note = Variant of serine peptidase from Bacillus sinesaloumensis
  source 1..1239: mol_type = other DNA
atggcagatcaagctagtcaagctaatggaaaccaggacgtcattgaaggcgagctgatcgtttcagtggaaccgaagaacggtaaacctgatgtgagcattcaaagtgcacaatccgtaacagggcaggaagacgtccttaaatcgaaaggctttacgatcgttgataccttgcatgtagaggatagcagcgtcaagccactcgtctcgaagaatttcaataagaaagtggtggagaagatgggactggtgtatcttgttcaatactctccggaccagtttaaaagttccaacattgcgaagaaagaactcagaaaagaattgatggatctgggctttaaagtccgctatataagcgaaaattacaagatgatggcgatcgaaggtacagccactcttcagggggtgcaccctaaccaagtttgggcgtatgagatgattaaagctccggaagcgtgggctattacgtctggatccctgagcgttaaagtagcagtcctggatacagggatcgaccataatcacccatccttggccaacttcgtgaatactaatcttggccgctcgtttgttggaggaaacaccatggatgttcaaggtcatggcacacatgttgctggcacgattgcatcttatgggagtgtaagcggagtgatgcagagtgcgacactgatcccggtcaaagtgctcgataattctggcagcgggtccctttacggtattacgcagggcatattgtatgccgccgacatcgatgcggacgtcattaacatgtctctgggtggaggaggctataatcagagcatggatgaggctgttcaaacagcagttgctcagggaaccattgtagtagcagcgactggcaatgatggtgcatcgtcgatcagttatcctgctgcctacagcagcgtcattgcggtgggatctgtggacagtaatcgtgttcgatcctcgttttctaactatggatctgggcttgaagttatggcaccgggcagcaacatctacagtacgtatcctaattccagatatacatctttgagtggtacaagcatggctactccgcacgttgcgggcgtagctgggctcattcgcgcagccaacccagacatagtggtcgcgcaagcccgtcagattctgcgggataccgcgcaagaagcaggatcgttcacacagtacggctatggaatcgtcgatgctcatgccgccgttgttgctgcatccggtggtagcggcggc

SEQ ID NO: 1150 - protein, 413 aa, synthetic construct
  REGION 1..413: note = Variant of serine peptidase from Bacillus sinesaloumensis
MADQASQANGNQDVIEGELIVSVEPKNGKPDVSIQSAQSVTGQEDVLKSKGFTIVDTLHVEDSSVKPLVSKNFNKKVVEKMGLVYLVQYSPDQFKSSNIAKKELRKELMDLGFKVRYISENYKMMAIEGTATLQGVHPNQVWAYEMIKAPEAWAITSGSLSVKVAVLDTGIDHNHPSLANFVNTNLGRSFVGGNTMDVQGHGTHVAGTIASYGSVSGVMQSATLIPVKVLDNSGSGSLYGITQGILYAADIDADVINMSLGGGGYNQSMDEAVQTAVAQGTIVVAATGNDGASSISYPAAYSSVIAVGSVDSNRVRSSFSNYGSGLEVMAPGSNIYSTYPNSRYTSLSGTSMATPHVAGVAGLIRAANPDIVVAQARQILRDTAQEAGSFTQYGYGIVDAHAAVVAASGGSGG

SEQ ID NO: 1151 - DNA, 1239 bp, synthetic construct
  misc_feature 1..1239: note = Variant of serine peptidase from Bacillus sinesaloumensis
  source 1..1239: mol_type = other DNA
atggcagatcaagctagtcaagctaatggaaaccaggacgtcattgaaggcgagctgatcgtttcagtggaaccgaagaacggtaaacctgatgtgagcattcaaagtgcacaatccgtaacagggcaggaagacgtccttaaatcgaaaggctttacgatcgttgataccttgcatgtagaggatagcagcgtcaagccactcgtctcgaagaatttcaataagaaagtggtggagaagatgggactggtgtatcttgttcaatactctccggaccagtttaaaagttccaacattgcgaagaaagaactcagaaaagaattgatggatctgggctttaaagtccgctatataagcgaaaattacaagatgatggcgatcgaaggtacagccactcttcagggggtgcaccctaaccaagtttgggcgtatgagatgattaaagctccggaagcgtgggctattacgtctggatccctgagcgttaaagtagcagtcctggatacagggatcgaccataatcacccatccttggccaacttcgtgaatactaatcttggccgctcgtttgttggaggaaacaccatggatgttcaaggtcatggcacacatgttgctggcacgattgcatcttatgggagtgtaagcggagtgatgcagagtgcgacactgatcccggtcaaagtgctcgataattctggcagcgggtccctttacggtattacgcaaggcatattgtatgccgccgacatcgatgcggacgtcattaacatgtctctgggtggaggaggctataatcagagcatggatgaggctgttcaaacagcagttgctcagggaaccattgtagtagcagcgactggcaatgatggtgcatcgtcgatcagttatcctgctgcctacagcagcgtcattgcggtgggatctgtggacattaatcgtgttcgatcctcgttttctaactatggatctgggcttgaagtgatggcaccgggcagcaacatctacagtacgtatcctaatggcagatatcgcagtttgagtggtacaagcatggctactccgcacgttgcgggcgtagctgggctcattcgcgcagccaacccagacatagtggtcgcgcaagcccgtcagattctgcgggataccgcgcaagaagcaggatcgttcacacagtacggctatggaatcgtcgatgctcatgccgccgttgttgctgcatccggtggtagcggcggc

SEQ ID NO: 1152 - protein, 413 aa, synthetic construct
  REGION 1..413: note = Variant of serine peptidase from Bacillus sinesaloumensis
MADQASQANGNQDVIEGELIVSVEPKNGKPDVSIQSAQSVTGQEDVLKSKGFTIVDTLHVEDSSVKPLVSKNFNKKVVEKMGLVYLVQYSPDQFKSSNIAKKELRKELMDLGFKVRYISENYKMMAIEGTATLQGVHPNQVWAYEMIKAPEAWAITSGSLSVKVAVLDTGIDHNHPSLANFVNTNLGRSFVGGNTMDVQGHGTHVAGTIASYGSVSGVMQSATLIPVKVLDNSGSGSLYGITQGILYAADIDADVINMSLGGGGYNQSMDEAVQTAVAQGTIVVAATGNDGASSISYPAAYSSVIAVGSVDINRVRSSFSNYGSGLEVMAPGSNIYSTYPNGRYRSLSGTSMATPHVAGVAGLIRAANPDIVVAQARQILRDTAQEAGSFTQYGYGIVDAHAAVVAASGGSGG

SEQ ID NO: 1153 - DNA, 1239 bp, synthetic construct
  misc_feature 1..1239: note = Variant of serine peptidase from Bacillus sinesaloumensis
  source 1..1239: mol_type = other DNA
atggcagatcaagctagtcaagctaatggaaaccaggacgtcattgaaggcgagctgatcgtttcagtggaaccgaagaacggtaaacctgatgtgagcattcaaagtgcacaatccgtaacagggcaggaagacgtccttaaatcgaaaggctttacgatcgttgataccttgcatgtagaggatagcagcgtcaagccactcgtctcgaagaatttcaataagaaagtggtggagaagatgggactggtgtatcttgttcaatactctccggaccagtttaaaagttccaacattgcgaagaaagaactcagaaaagaattgatggatctgggctttaaagtccgctatataagcgaaaattacaagatgatggcgatcgaaggtacagccactcttcagggggtgcaccctaaccaagtttgggcgtatgagatgattaaagctccggaagcgtgggctattacgagtggatccctgagcgttaaagtagcagtcctggatacagggatcgaccataatcacccatccttggccaacttcgtgaatactaatcttggccgctcgtttgttggaggaaacaccatggatgttcaaggtcatggcacacatgttgctggcacgattgcatcttatgggagtgtaagcggagtgatgcagagtgcgacactgatcccggtcaaagtgctcgataattctggcagcgggtccctttacggtattacgcaaggcatattgtatgccgccgacatcgatgcggacgtcattaacatgtctctgggtggaggaggctataatcagagcatggatgaggctgttcaaacagcagttgctcagggaaccattgtagtagcagcgactggcaatgatggtgcatcgtcgatcagttatcctgctgcctacagcagcgtcattgcggtgggatctgtggactccaatcgtgttcgatcctcgttttctaactatggatctgggcttgaactgatggcaccgggcagcaacatctacagtacgtatcctaattccagatatacatctttgagtggtacaagcatggctactccgcacgttgcgggcgtagctgggctcattcgcgcagccaacccagacatagtggtcgcgcaagcccgtcagattctgcgggataccgcgcaagaagcaggatcgttcacacagtacggctatggaatcgtcgatgctcatgccgccgttgttgctgcatccggtggtagcggcggc

SEQ ID NO: 1154 - protein, 413 aa, synthetic construct
  REGION 1..413: note = Variant of serine peptidase from Bacillus sinesaloumensis
MADQASQANGNQDVIEGELIVSVEPKNGKPDVSIQSAQSVTGQEDVLKSKGFTIVDTLHVEDSSVKPLVSKNFNKKVVEKMGLVYLVQYSPDQFKSSNIAKKELRKELMDLGFKVRYISENYKMMAIEGTATLQGVHPNQVWAYEMIKAPEAWAITSGSLSVKVAVLDTGIDHNHPSLANFVNTNLGRSFVGGNTMDVQGHGTHVAGTIASYGSVSGVMQSATLIPVKVLDNSGSGSLYGITQGILYAADIDADVINMSLGGGGYNQSMDEAVQTAVAQGTIVVAATGNDGASSISYPAAYSSVIAVGSVDSNRVRSSFSNYGSGLELMAPGSNIYSTYPNSRYTSLSGTSMATPHVAGVAGLIRAANPDIVVAQARQILRDTAQEAGSFTQYGYGIVDAHAAVVAASGGSGG

SEQ ID NO: 1155 - DNA, 1239 bp, synthetic construct
  misc_feature 1..1239: note = Variant of serine peptidase from Bacillus sinesaloumensis
  source 1..1239: mol_type = other DNA
atggcagatcaagctagtcaagctaatggaaaccaggacgtcattgaaggcgagctgatcgtttcagtggaaccgaagaacggtaaacctgatgtgagcattcaaagtgcacaatccgtaacagggcaggaagacgtccttaaatcgaaaggctttacgatcgttgataccttgcatgtagaggatagcagcgtcaagccactcgtctcgaagaatttcaataagaaagtggtggagaagatgggactggtgtatcttgttcaatactctccggaccagtttaaaagttccaacattgcgaagaaagaactcagaaaagaattgatggatctgggctttaaagtccgctatataagcgaaaattacaagatgatggcgatcgaaggtacagccactcttcagggggtgcaccctaaccaagtttgggcgtataatatgattaaagctccggaagcgtgggctattacgtctggatccctgagcgttaaagtagcagtcctggatacagggatcgaccataatcacccatccttggccaacttcgtgaatactaatcttggccgctcgtttgttggaggaaacaccatggatgttcaaggtcatggcacacatgttgctggcacgattgcatcttatgggagtgtaagcggagtgatgcagagtgcgacactgatcccggtcaaagtgctcgataattctggcagcgggtccctttacggtattacgcagggcatattgtatgccgccgacatcgatgcggacgtcattaacatgtctctgggtggaggaggctataatcagagcatggatgaggctgttcaaacagcagttgcttatggaaccattgtagtagcagcgactggcaatgatggtgcatcgtcgatcagttatcctgctgcctacagcagcgtcattgcggtgggatctgtggactccaatcgtgttcgatcctcgttttctaactatggatctgggcttgaactgatggcaccgggcagcaacatctacagtacgtatcctaatggcagatatcgcagtttgagtggtacaagcatggctactccgcacgttgcgggcgtagctgggctcattcgcgcagccaacccagacatagtggtcgcgcaagcccgtcagattctgcgggataccgcgcaagaagcaggatcgttcacacagtacggctatggaatcgtcgatgctcatgccgccgttgttgctgcatccggtggtagcggcggc

SEQ ID NO: 1156 - protein, 413 aa, synthetic construct
  REGION 1..413: note = Variant of serine peptidase from Bacillus sinesaloumensis
MADQASQANGNQDVIEGELIVSVEPKNGKPDVSIQSAQSVTGQEDVLKSKGFTIVDTLHVEDSSVKPLVSKNFNKKVVEKMGLVYLVQYSPDQFKSSNIAKKELRKELMDLGFKVRYISENYKMMAIEGTATLQGVHPNQVWAYNMIKAPEAWAITSGSLSVKVAVLDTGIDHNHPSLANFVNTNLGRSFVGGNTMDVQGHGTHVAGTIASYGSVSGVMQSATLIPVKVLDNSGSGSLYGITQGILYAADIDADVINMSLGGGGYNQSMDEAVQTAVAYGTIVVAATGNDGASSISYPAAYSSVIAVGSVDSNRVRSSFSNYGSGLELMAPGSNIYSTYPNGRYRSLSGTSMATPHVAGVAGLIRAANPDIVVAQARQILRDTAQEAGSFTQYGYGIVDAHAAVVAASGGSGG

SEQ ID NO: 1157 - DNA, 1239 bp, synthetic construct
  misc_feature 1..1239: note = Variant of serine peptidase from Bacillus sinesaloumensis
  source 1..1239: mol_type = other DNA
atggcagatcaagctagtcaagctaatggaaaccaggacgtcattgaaggcgagctgatcgtttcagtggaaccgaagaacggtaaacctgatgtgagcattcaaagtgcacaatccgtaacagggcaggaagacgtccttaaatcgaaaggctttacgatcgttgataccttgcatgtagaggatagcagcgtcaagccactcgtctcgaagaatttcaataagaaagtggtggagaagatgggactggtgtatcttgttcaatactctccggaccagtttaaaagttccaacattgcgaagaaagaactcagaaaagaattgatggatctgggctttaaagtccgctatataagcgaaaattacaagatgatggcgatcgaaggtacagccactcttcagggggtgcaccctaaccaagtttgggcgtataatatgattaaagctccggaagcgtgggctattacgtctggatccctgagcgttaaagtagcagtcctggatacagggatcgaccataatcacccatccttggccaacttcgtgaatactaatcttggccgctcgtttgttggaggaaacaccatggatgttcaaggtcatggcacacatgttgctggcacgattgcatcttatgggagtgtaagcggagtgatgcagagtgcgacactgatcccggtcaaagtgctcgataattctggcagcgggtccctttacggtattacgcagggcatattgtatgccgccactatcgatgcggacgtcattaacatgtctctgggtggaggaggctataatcagagcatggatgaggctgttcaaacagcagttgctcagggaaccattgtagtagcagcgactggcaatgatggtgcatcgtcgatcagttatcctgctgcctacagcagcgtcattgcggtgggatctgtggactccaatcgtgttcgatcctcgttttctaactatggatctgggcttgaactgatggcaccgggcagcaacatctacagtacgtatcctaatggcagatatcgcagtttgagtggtacaagcatggctactccgcacgttgcgggcgtagctgggctcattcgcgcagccaacccagacatagtggtcgcgcaagcccgtcagattctgcgggataccgcgcaagaagcaggatcgttcacacagtacggctatggaatcgtcgatgctcatgccgccgttgttgctgcatccggtggtagcggcggc

SEQ ID NO: 1158 - protein, 413 aa, synthetic construct
  REGION 1..413: note = Variant of serine peptidase from Bacillus sinesaloumensis
MADQASQANGNQDVIEGELIVSVEPKNGKPDVSIQSAQSVTGQEDVLKSKGFTIVDTLHVEDSSVKPLVSKNFNKKVVEKMGLVYLVQYSPDQFKSSNIAKKELRKELMDLGFKVRYISENYKMMAIEGTATLQGVHPNQVWAYNMIKAPEAWAITSGSLSVKVAVLDTGIDHNHPSLANFVNTNLGRSFVGGNTMDVQGHGTHVAGTIASYGSVSGVMQSATLIPVKVLDNSGSGSLYGITQGILYAATIDADVINMSLGGGGYNQSMDEAVQTAVAQGTIVVAATGNDGASSISYPAAYSSVIAVGSVDSNRVRSSFSNYGSGLELMAPGSNIYSTYPNGRYRSLSGTSMATPHVAGVAGLIRAANPDIVVAQARQILRDTAQEAGSFTQYGYGIVDAHAAVVAASGGSGG

SEQ ID NO: 1159 - DNA, 1239 bp, synthetic construct
  misc_feature 1..1239: note = Variant of serine peptidase from Bacillus sinesaloumensis
  source 1..1239: mol_type = other DNA
atggcagatcaagctagtcaagctaatggaaaccaggacgtcattgaaggcgagctgatcgtttcagtggaaccgaagaacggtaaacctgatgtgagcattcaaagtgcacaatccgtaacagggcaggaagacgtccttaaatcgaaaggctttacgatcgttgataccttgcatgtagaggatagcagcgtcaagccactcgtctcgaagaatttcaataagaaagtggtggagaagatgggactggtgtatcttgttcaatactctccggaccagtttaaaagttccaacattgcgaagaaagaactcagaaaagaattgatggatctgggctttaaagtccgctatataagcgaaaattacaagatgatggcgatcgaaggtacagccactcttcagggggtgcaccctaaccaagtttgggcgtataatatgattaaagctccggaagcgtggtgtattacgtctggatccctgagcgttaaagtagcagtcctggatacagggatcgaccataatcacccatccttggccaacttcgtgaatactaatcttggccgctcgtttgttggaggaaacaccatggatgttcaaggtcatggcacacatgttgctggcacgattgcatcttatgggagtgtaagcggagtgatgcagagtgcgacactgatcccggtcaaagtgctcgataattctggcagcgggtccctttacggtattacgcagggcatattgtatgccgccgacatcgatgcggacgtcattaacatgtctctgggtggaggaggctataatcagagcatggatgaggctgttcaaacagcagttgctcagggaaccattgtagtagcagcgactggcaatgatggtgcatcgtcgatcagttatcctgctgcctacagcagcgtcattgcggtgggatctgtggactccaatcgtgttcgatcctcgttttctaactatggatctgggcttgaactgatggcaccgggcagcaacatctacagtacgtatcctaatggcagatatcgcagtttgagtggtacaagcatggctactccgcacgttgcgggcgtagctgggctcattcgcgcagccaacccagacatagtggtcgcgcaagcccgtcagattctgcgggataccgcgcaagaagcaggatcgttcacacagtacggctatggaatcgtcgatgctcatgccgccgttgttgctgcatccggtggtagcggcggc

SEQ ID NO: 1160 - protein, 413 aa, synthetic construct
  REGION 1..413: note = Variant of serine peptidase from Bacillus sinesaloumensis
MADQASQANGNQDVIEGELIVSVEPKNGKPDVSIQSAQSVTGQEDVLKSKGFTIVDTLHVEDSSVKPLVSKNFNKKVVEKMGLVYLVQYSPDQFKSSNIAKKELRKELMDLGFKVRYISENYKMMAIEGTATLQGVHPNQVWAYNMIKAPEAWCITSGSLSVKVAVLDTGIDHNHPSLANFVNTNLGRSFVGGNTMDVQGHGTHVAGTIASYGSVSGVMQSATLIPVKVLDNSGSGSLYGITQGILYAADIDADVINMSLGGGGYNQSMDEAVQTAVAQGTIVVAATGNDGASSISYPAAYSSVIAVGSVDSNRVRSSFSNYGSGLELMAPGSNIYSTYPNGRYRSLSGTSMATPHVAGVAGLIRAANPDIVVAQARQILRDTAQEAGSFTQYGYGIVDAHAAVVAASGGSGG

SEQ ID NO: 1161 - DNA, 1239 bp, synthetic construct
  misc_feature 1..1239: note = Variant of serine peptidase from Bacillus sinesaloumensis
  source 1..1239: mol_type = other DNA
atggcagatcaagctagtcaagctaatggaaaccaggacgtcattgaaggcgagctgatcgtttcagtggaaccgaagaacggtaaacctgatgtgagcattcaaagtgcacaatccgtaacagggcaggaagacgtccttaaatcgaaaggctttacgatcgttgataccttgcatgtagaggatagcagcgtcaagccactcgtctcgaagaatttcaataagaaagtggtggagaagatgggactggtgtatcttgttcaatactctccggaccagtttaaaagttccaacattgcgaagaaagaactcagaaaagaattgatggatctgggctttaaagtccgctatataagcgaaaattacaagatgatggcgatcgaaggtacagccactcttcagggggtgcaccctaaccaagtttgggcgtataatatgattaaagctccggaagcgtgggctattacgtctggatccctgagcgttaaagtagcagtcctggatacagggatcgaccataatcacccatccttggccaacttcgtgaatactaatcttggccgctcgtttgttggaggaaacaccatggatgttcaaggtcatggcacacatgttgctggcacgattgcatcttatgggtatgtaagcggagtgatgcagagtgcgacactgatcccggtcaaagtgctcgataattctggcagcgggtccctttacggtattacgcagggcatattgtatgccgccgacatcgatgcggacgtcattaacatgtctctgggtggaggaggctataatcagagcatggatgaggctgttcaaacagcagttgctcagggaaccattgtagtagcagcgactggcaatgatggtgcatcgtcgatcagttatcctgctgcctacagcagcgtcattgcggtgggatctgtggactccaatcgtgttcgatcctcgttttctaactatggatctgggcttgaactgatggcaccgggcagcaacatctacagtacgtatcctaatggcagatatcgcagtttgagtggtacaagcatggctactccgcacgttgcgggcgtagctgggctcattcgcgcagccaacccagacatagtggtcgcgcaagcccgtcagattctgcgggataccgcgcaagaagcaggatcgttcacacagtacggctatggaatcgtcgatgctcatgccgccgttgttgctgcatccggtggtagcggcggc

SEQ ID NO: 1162 - protein, 413 aa, synthetic construct
  REGION 1..413: note = Variant of serine peptidase from Bacillus sinesaloumensis
MADQASQANGNQDVIEGELIVSVEPKNGKPDVSIQSAQSVTGQEDVLKSKGFTIVDTLHVEDSSVKPLVSKNFNKKVVEKMGLVYLVQYSPDQFKSSNIAKKELRKELMDLGFKVRYISENYKMMAIEGTATLQGVHPNQVWAYNMIKAPEAWAITSGSLSVKVAVLDTGIDHNHPSLANFVNTNLGRSFVGGNTMDVQGHGTHVAGTIASYGYVSGVMQSATLIPVKVLDNSGSGSLYGITQGILYAADIDADVINMSLGGGGYNQSMDEAVQTAVAQGTIVVAATGNDGASSISYPAAYSSVIAVGSVDSNRVRSSFSNYGSGLELMAPGSNIYSTYPNGRYRSLSGTSMATPHVAGVAGLIRAANPDIVVAQARQILRDTAQEAGSFTQYGYGIVDAHAAVVAASGGSGG

SEQ ID NO: 1163 - DNA, 1239 bp, synthetic construct
  misc_feature 1..1239: note = Variant of serine peptidase from Bacillus sinesaloumensis
  source 1..1239: mol_type = other DNA
atggcagatcaagctagtcaagctaatggaaaccaggacgtcattgaaggcgagctgatcgtttcagtggaaccgaagaacggtaaacctgatgtgagcattcaaagtgcacaatccgtaacagggcaggaagacgtccttaaatcgaaaggctttacgatcgttgataccttgcatgtagaggatagcagcgtcaagccactcgtctcgaagaatttcaataagaaagtggtggagaagatgggactggtgtatcttgttcaatactctccggaccagtttaaaagttccaacattgcgaagaaagaactcagaaaagaattgatggatctgggctttaaagtccgctatataagcgaaaattacaagatgatggcgatcgaaggtacagccactcttcagggggtgcaccctaaccaagtttgggcgtataatatgattaaagctccggaagcgtgggctattacgtctggatccctgagcgttaaagtagcagtcctggatacagggatcgaccataatcacccatccttggccaacttcgtgaatactaatcttggccgctcgtttgttggaggaaacaccatggatgttcaaggtcatggcacacatgttgctggcacgattgcatcttatgggagtgtaagcggagtgatgcagagtgcgacactgatcccggtcaaagtgctcgataattctggcagcgggtccctttacggtattacgcagggcatattgtatgccagtgacatcgatgcggacgtcattaacatgtctctgggtggaggaggctataatcagagcatggatgaggctgttcaaacagcagttgctcagggaaccattgtagtagcagcgactggcaatgatggtgcatcgtcgatcagttatcctgctgcctacagcagcgtcattgcggtgggatctgtggactccaatcgtgttcgatcctcgttttctaactatggatctgggcttgaactgatggcaccgggcagcaacatctacagtacgtatcctaatggcagatatcgcagtttgagtggtacaagcatggctactccgcacgttgcgggcgtagctgggctcattcgcgcagccaacccagacatagtggtcgcgcaagcccgtcagattctgcgggataccgcgcaagaagcaggatcgttcacacagtacggctatggaatcgtcgatgctcatgccgccgttgttgctgcatccggtggtagcggcggc

SEQ ID NO: 1164 - protein, 413 aa, synthetic construct
  REGION 1..413: note = Variant of serine peptidase from Bacillus sinesaloumensis
MADQASQANGNQDVIEGELIVSVEPKNGKPDVSIQSAQSVTGQEDVLKSKGFTIVDTLHVEDSSVKPLVSKNFNKKVVEKMGLVYLVQYSPDQFKSSNIAKKELRKELMDLGFKVRYISENYKMMAIEGTATLQGVHPNQVWAYNMIKAPEAWAITSGSLSVKVAVLDTGIDHNHPSLANFVNTNLGRSFVGGNTMDVQGHGTHVAGTIASYGSVSGVMQSATLIPVKVLDNSGSGSLYGITQGILYASDIDADVINMSLGGGGYNQSMDEAVQTAVAQGTIVVAATGNDGASSISYPAAYSSVIAVGSVDSNRVRSSFSNYGSGLELMAPGSNIYSTYPNGRYRSLSGTSMATPHVAGVAGLIRAANPDIVVAQARQILRDTAQEAGSFTQYGYGIVDAHAAVVAASGGSGG

SEQ ID NO: 1165 - DNA, 1239 bp, synthetic construct
  misc_feature 1..1239: note = Variant of serine peptidase from Bacillus sinesaloumensis
  source 1..1239: mol_type = other DNA
atggcagatcaagctagtcaagctaatggaaaccaggacgtcattgaaggcgagctgatcgtttcagtggaaccgaagaacggtaaacctgatgtgagcattcaaagtgcacaatccgtaacagggcaggaagacgtccttaaatcgaaaggctttacgatcgttgataccttgcatgtagaggatagcagcgtcaagccactcgtctcgaagaatttcaataagaaagtggtggagaagatgggactggtgtatcttgttcaatactctccggaccagtttaaaagttccaacattgcgaagaaagaactcagaaaagaattgatggatctgggctttaaagtccgctatataagcgaaaattacaagatgatggcgatcgaaggtacagccactcttcagggggtgcaccctaaccaagtttgggcgtataatatgattaaagctccggaagcgtgggctattacgtctggatccctgagcgttaaagtagcagtcctggatacagggatcgaccataatcacccatccttggccaacttcgtgaatactaatcttggccgctcgtttgttggaggaaacaccatggatgttcaaggtcatggcacacatgttgctggcacgattgcatcttatgggagtgtaagcggagtgatgcagagtgcgacactgatcccggtcaaagtgctcgataattctggcagcgggtccctttacggtattacgcagggcatattgtatgccgccgacatcgatgcggacgtcattaacatgtctctgggtggaggaggctataatcagagcatggatgaggctgttcaagcggcagttgctcagggaaccattgtagtagcagcgactggcaatgatggtgcatcgtcgatcagttatcctgctgcctacagcagcgtcattgcggtgggatctgtggactccaatcgtgttcgatcctcgttttctaactatggatctgggcttgaactgatggcaccgggcagcaacatctacagtacgtatcctaatggcagatatcgcagtttgagtggtacaagcatggctactccgcacgttgcgggcgtagctgggctcattcgcgcagccaacccagacatagtggtcgcgcaagcccgtcagattctgcgggataccgcgcaagaagcaggatcgttcacacagtacggctatggaatcgtcgatgctcatgccgccgttgttgctgcatccggtggtagcggcggc

SEQ ID NO: 1166 - protein, 413 aa, synthetic construct
  REGION 1..413: note = Variant of serine peptidase from Bacillus sinesaloumensis
MADQASQANGNQDVIEGELIVSVEPKNGKPDVSIQSAQSVTGQEDVLKSKGFTIVDTLHVEDSSVKPLVSKNFNKKVVEKMGLVYLVQYSPDQFKSSNIAKKELRKELMDLGFKVRYISENYKMMAIEGTATLQGVHPNQVWAYNMIKAPEAWAITSGSLSVKVAVLDTGIDHNHPSLANFVNTNLGRSFVGGNTMDVQGHGTHVAGTIASYGSVSGVMQSATLIPVKVLDNSGSGSLYGITQGILYAADIDADVINMSLGGGGYNQSMDEAVQAAVAQGTIVVAATGNDGASSISYPAAYSSVIAVGSVDSNRVRSSFSNYGSGLELMAPGSNIYSTYPNGRYRSLSGTSMATPHVAGVAGLIRAANPDIVVAQARQILRDTAQEAGSFTQYGYGIVDAHAAVVAASGGSGG

SEQ ID NO: 1167 - DNA, 1239 bp, synthetic construct
  misc_feature 1..1239: note = Variant of serine peptidase from Bacillus sinesaloumensis
  source 1..1239: mol_type = other DNA
atggcagatcaagctagtcaagctaatggaaaccaggacgtcattgaaggcgagctgatcgtttcagtggaaccgaagaacggtaaacctgatgtgagcattcaaagtgcacaatccgtaacagggcaggaagacgtccttaaatcgaaaggctttacgatcgttgataccttgcatgtagaggatagcagcgtcaagccactcgtctcgaagaatttcaataagaaagtggtggagaagatgggactggtgtatcttgttcaatactctccggaccagtttaaaagttccaacattgcgaagaaagaactcagaaaagaattgatggatctgggctttaaagtccgctatataagcgaaaattacaagatgatggcgatcgaaggtacagccactcttcagggggtggcgcctaaccaagtttgggcgtataatatgattaaagctccggaagcgtgggctattacgtctggatccctgagcgttaaagtagcagtcctggatacagggatcgaccataatcacccatccttggccaacttcgtgaatactaatcttggccgctcgtttgttggaggaaacaccatggatgttcaaggtcatggcacacatgttgctggcacgattgcatcttatgggagtgtaagcggagtgatgcagagtgcgacactgatcccggtcaaagtgctcgataattctggcagcgggtccctttacggtattacgcagggcatattgtatgccgccgacatcgatgcggacgtcattaacatgtctctgggtggaggaggctataatcagagcatggatgaggctgttcaaacagcagttgctcagggaaccattgtagtagcagcgactggcaatgatggtgcatcgtcgatcagttatcctgctgcctacagcagcgtcattgcggtgggatctgtggactccaatcgtgttcgatcctcgttttctaactatggatctgggcttgaactgatggcaccgggcagcaacatctacagtacgtatcctaatggcagatatcgcagtttgagtggtacaagcatggctactccgcacgttgcgggcgtagctgggctcattcgcgcagccaacccagacatagtggtcgcgcaagcccgtcagattctgcgggataccgcgcaagaagcaggatcgttcacacagtacggctatggaatcgtcgatgctcatgccgccgttgttgctgcatccggtggtagcggcggc

SEQ ID NO: 1168 - protein, 413 aa, synthetic construct
  REGION 1..413: note = Variant of serine peptidase from Bacillus sinesaloumensis
MADQASQANGNQDVIEGELIVSVEPKNGKPDVSIQSAQSVTGQEDVLKSKGFTIVDTLHVEDSSVKPLVSKNFNKKVVEKMGLVYLVQYSPDQFKSSNIAKKELRKELMDLGFKVRYISENYKMMAIEGTATLQGVAPNQVWAYNMIKAPEAWAITSGSLSVKVAVLDTGIDHNHPSLANFVNTNLGRSFVGGNTMDVQGHGTHVAGTIASYGSVSGVMQSATLIPVKVLDNSGSGSLYGITQGILYAADIDADVINMSLGGGGYNQSMDEAVQTAVAQGTIVVAATGNDGASSISYPAAYSSVIAVGSVDSNRVRSSFSNYGSGLELMAPGSNIYSTYPNGRYRSLSGTSMATPHVAGVAGLIRAANPDIVVAQARQILRDTAQEAGSFTQYGYGIVDAHAAVVAASGGSGG

SEQ ID NO: 1169 - DNA, 1239 bp, synthetic construct
  misc_feature 1..1239: note = Variant of serine peptidase from Bacillus sinesaloumensis
  source 1..1239: mol_type = other DNA
atggcagatcaagctagtcaagctaatggaaaccaggacgtcattgaaggcgagctgatcgtttcagtggaaccgaagaacggtaaacctgatgtgagcattcaaagtgcacaatccgtaacagggcaggaagacgtccttaaatcgaaaggctttacgatcgttgataccttgcatgtagaggatagcagcgtcaagccactcgtctcgaagaatttcaataagaaagtggtggagaagatgggactggtgtatcttgttcaatactctccggaccagtttaaaagttccaacattgcgaagaaagaactcagaaaagaattgatggatctgggctttaaagtccgctatataagcgaaaattacaagatgatggcgatcgaaggtacagccactcttcagggggtgcaccctaaccaagtttgggcgtataatatgattaaagctccggaagcgtgggctattacgtctggatccctggatgttaaagtagcagtcctggatacagggatcgaccataatcacccatccttggccaacttcgtgaatactaatcttggccgctcgtttgttggaggaaacaccatggatgttcaaggtcatggcacacatgttgctggcacgattgcatcttatgggagtgtaagcggagtgatgcagagtgcgacactgatcccggtcaaagtgctcgataattctggcagcgggtccctttacggtattacgcagggcatattgtatgccgccgacatcgatgcggacgtcattaacatgtctctgggtggaggaggctataatcagagcatggatgaggctgttcaaacagcagttgctcagggaaccattgtagtagcagcgactggcaatgatggtgcatcgtcgatcagttatcctgctgcctacagcagcgtcattgcggtgggatctgtggactccaatcgtgttcgatcctcgttttctaactatggatctgggcttgaactgatggcaccgggcagcaacatctacagtacgtatcctaatggcagatatcgcagtttgagtggtacaagcatggctactccgcacgttgcgggcgtagctgggctcattcgcgcagccaacccagacatagtggtcgcgcaagcccgtcagattctgcgggataccgcgcaagaagcaggatcgttcacacagtacggctatggaatcgtcgatgctcatgccgccgttgttgctgcatccggtggtagcggcggc

SEQ ID NO: 1170 - protein, 413 aa, synthetic construct
  REGION 1..413: note = Variant of serine peptidase from Bacillus sinesaloumensis
MADQASQANGNQDVIEGELIVSVEPKNGKPDVSIQSAQSVTGQEDVLKSKGFTIVDTLHVEDSSVKPLVSKNFNKKVVEKMGLVYLVQYSPDQFKSSNIAKKELRKELMDLGFKVRYISENYKMMAIEGTATLQGVHPNQVWAYNMIKAPEAWAITSGSLDVKVAVLDTGIDHNHPSLANFVNTNLGRSFVGGNTMDVQGHGTHVAGTIASYGSVSGVMQSATLIPVKVLDNSGSGSLYGITQGILYAADIDADVINMSLGGGGYNQSMDEAVQTAVAQGTIVVAATGNDGASSISYPAAYSSVIAVGSVDSNRVRSSFSNYGSGLELMAPGSNIYSTYPNGRYRSLSGTSMATPHVAGVAGLIRAANPDIVVAQARQILRDTAQEAGSFTQYGYGIVDAHAAVVAASGGSGG

SEQ ID NO: 1171 - DNA, 1239 bp, synthetic construct
  misc_feature 1..1239: note = Variant of serine peptidase from Bacillus sinesaloumensis
  source 1..1239: mol_type = other DNA
atggcagatcaagctagtcaagctaatggaaaccaggacgtcattgaaggcgagctgatcgtttcagtggaaccgaagaacggtaaacctgatgtgagcattcaaagtgcacaatccgtaacagggcaggaagacgtccttaaatcgaaaggctttacgatcgttgataccttgcatgtagaggatagcagcgtcaagccactcgtctcgaagaatttcaataagaaagtggtggagaagatgggactggtgtatcttgttcaatactctccggaccagtttaaaagttccaacattgcgaagaaagaactcagaaaagaattgatggatctgggctttaaagtccgctatataagcgaaaattacaagatgatggcgatcgaaggtacagccactcttcagggggtgcaccctaaccaagtttgggcgtataatatgattaaagctccggaagcgtgggctattacgtctggatccctgagcgttaaagtagcagtcctggatacagggatcgaccataatcacccatccttggcccatttcgtgaatactaatcttggccgctcgtttgttggaggaaacaccatggatgttcaaggtcatggcacacatgttgctggcacgattgcatcttatgggagtgtaagcggagtgatgcagagtgcgacactgatcccggtcaaagtgctcgataattctggcagcgggtccctttacggtattacgcagggcatattgtatgccgccgacatcgatgcggacgtcattaacatgtctctgggtggaggaggctataatcagagcatggatgaggctgttcaaacagcagttgctcagggaaccattgtagtagcagcgactggcaatgatggtgcatcgtcgatcagttatcctgctgcctacagcagcgtcattgcggtgggatctgtggactccaatcgtgttcgatcctcgttttctaactatggatctgggcttgaactgatggcaccgggcagcaacatctacagtacgtatcctaatggcagatatcgcagtttgagtggtacaagcatggctactccgcacgttgcgggcgtagctgggctcattcgcgcagccaacccagacatagtggtcgcgcaagcccgtcagattctgcgggataccgcgcaagaagcaggatcgttcacacagtacggctatggaatcgtcgatgctcatgccgccgttgttgctgcatccggtggtagcggcggc

SEQ ID NO: 1172 - protein, 413 aa, synthetic construct
  REGION 1..413: note = Variant of serine peptidase from Bacillus sinesaloumensis
MADQASQANGNQDVIEGELIVSVEPKNGKPDVSIQSAQSVTGQEDVLKSKGFTIVDTLHVEDSSVKPLVSKNFNKKVVEKMGLVYLVQYSPDQFKSSNIAKKELRKELMDLGFKVRYISENYKMMAIEGTATLQGVHPNQVWAYNMIKAPEAWAITSGSLSVKVAVLDTGIDHNHPSLAHFVNTNLGRSFVGGNTMDVQGHGTHVAGTIASYGSVSGVMQSATLIPVKVLDNSGSGSLYGITQGILYAADIDADVINMSLGGGGYNQSMDEAVQTAVAQGTIVVAATGNDGASSISYPAAYSSVIAVGSVDSNRVRSSFSNYGSGLELMAPGSNIYSTYPNGRYRSLSGTSMATPHVAGVAGLIRAANPDIVVAQARQILRDTAQEAGSFTQYGYGIVDAHAAVVAASGGSGG

SEQ ID NO: 1173 - DNA, 1239 bp, synthetic construct
  misc_feature 1..1239: note = Variant of serine peptidase from Bacillus sinesaloumensis
  source 1..1239: mol_type = other DNA
atggcagatcaagctagtcaagctaatggaaaccaggacgtcattgaaggcgagctgatcgtttcagtggaaccgaagaacggtaaacctgatgtgagcattcaaagtgcacaatccgtaacagggcaggaagacgtccttaaatcgaaaggctttacgatcgttgataccttgcatgtagaggatagcagcgtcaagccactcgtctcgaagaatttcaataagaaagtggtggagaagatgggactggtgtatcttgttcaatactctccggaccagtttaaaagttccaacattgcgaagaaagaactcagaaaagaattgatggatctgggctttaaagtccgctatataagcgaaaattacaagatgatggcgatcgaaggtacagccactcttcagggggtgcaccctaaccaagtttgggcgtataatatgattaaagctccggaagcgtgggctattacgtctggatccctgagcgttaaagtagcagtcctggatacagggatcgaccatctgcacccatccttggccaacttcgtgaatactaatcttggccgctcgtttgttggaggaaacaccatggatgttcaaggtcatggcacacatgttgctggcacgattgcatcttatgggagtgtaagcggagtgatgcagagtgcgacactgatcccggtcaaagtgctcgataattctggcagcgggtccctttacggtattacgcagggcatattgtatgccgccgacatcgatgcggacgtcattaacatgtctctgggtggaggaggctataatcagagcatggatgaggctgttcaaacagcagttgctcagggaaccattgtagtagcagcgactggcaatgatggtgcatcgtcgatcagttatcctgctgcctacagcagcgtcattgcggtgggatctgtggactccaatcgtgttcgatcctcgttttctaactatggatctgggcttgaactgatggcaccgggcagcaacatctacagtacgtatcctaatggcagatatcgcagtttgagtggtacaagcatggctactccgcacgttgcgggcgtagctgggctcattcgcgcagccaacccagacatagtggtcgcgcaagcccgtcagattctgcgggataccgcgcaagaagcaggatcgttcacacagtacggctatggaatcgtcgatgctcatgccgccgttgttgctgcatccggtggtagcggcggc

SEQ ID NO: 1174 - protein, 413 aa, synthetic construct
  REGION 1..413: note = Variant of serine peptidase from Bacillus sinesaloumensis
MADQASQANGNQDVIEGELIVSVEPKNGKPDVSIQSAQSVTGQEDVLKSKGFTIVDTLHVEDSSVKPLVSKNFNKKVVEKMGLVYLVQYSPDQFKSSNIAKKELRKELMDLGFKVRYISENYKMMAIEGTATLQGVHPNQVWAYNMIKAPEAWAITSGSLSVKVAVLDTGIDHLHPSLANFVNTNLGRSFVGGNTMDVQGHGTHVAGTIASYGSVSGVMQSATLIPVKVLDNSGSGSLYGITQGILYAADIDADVINMSLGGGGYNQSMDEAVQTAVAQGTIVVAATGNDGASSISYPAAYSSVIAVGSVDSNRVRSSFSNYGSGLELMAPGSNIYSTYPNGRYRSLSGTSMATPHVAGVAGLIRAANPDIVVAQARQILRDTAQEAGSFTQYGYGIVDAHAAVVAASGGSGG

SEQ ID NO: 1175 - DNA, 1239 bp, synthetic construct
  misc_feature 1..1239: note = Variant of serine peptidase from Bacillus sinesaloumensis
  source 1..1239: mol_type = other DNA
atggcagatcaagctagtcaagctaatggaaaccaggacgtcattgaaggcgagctgatcgtttcagtggaaccgaagaacggtaaacctgatgtgagcattcaaagtgcacaatccgtaacagggcaggaagacgtccttaaatcgaaaggctttacgatcgttgataccttgcatgtagaggatagcagcgtcaagccactcgtctcgaagaatttcaataagaaagtggtggagaagatgggactggtgtatcttgttcaatactctccggaccagtttaaaagttccaacattgcgaagaaagaactcagaaaagaattgatggatctgggctttaaagtccgctatataagcgaaaattacaagatgatggcgatcgaaggtacagccactcttcagggggtgcaccctaagcaagtttgggcgtataatatgattaaagctccggaagcgtgggctattacgtctggatccctgagcgttaaagtagcagtcctggatacagggatcgaccataatcacccatccttggccaacttcgtgaatactaatcttggccgctcgtttgttggaggaaacaccatggatgttcaaggtcatggcacacatgttgctggcacgattgcatcttatgggagtgtaagcggagtgatgcagagtgcgacactgatcccggtcaaagtgctcgataattctggcagcgggtccctttacggtattacgcagggcatattgtatgccgccgacatcgatgcggacgtcattaacatgtctctgggtggaggaggctataatcagagcatggatgaggctgttcaaacagcagttgctcagggaaccattgtagtagcagcgactggcaatgatggtgcatcgtcgatcagttatcctgctgcctacagcagcgtcattgcggtgggatctgtggactccaatcgtgttcgatcctcgttttctaactatggatctgggcttgaactgatggcaccgggcagcaacatctacagtacgtatcctaatggcagatatcgcagtttgagtggtacaagcatggctactccgcacgttgcgggcgtagctgggctcattcgcgcagccaacccagacatagtggtcgcgcaagcccgtcagattctgcgggataccgcgcaagaagcaggatcgttcacacagtacggctatggaatcgtcgatgctcatgccgccgttgttgctgcatccggtggtagcggcggc

SEQ ID NO: 1176 - protein, 413 aa, synthetic construct
  REGION 1..413: note = Variant of serine peptidase from Bacillus sinesaloumensis
MADQASQANGNQDVIEGELIVSVEPKNGKPDVSIQSAQSVTGQEDVLKSKGFTIVDTLHVEDSSVKPLVSKNFNKKVVEKMGLVYLVQYSPDQFKSSNIAKKELRKELMDLGFKVRYISENYKMMAIEGTATLQGVHPKQVWAYNMIKAPEAWAITSGSLSVKVAVLDTGIDHNHPSLANFVNTNLGRSFVGGNTMDVQGHGTHVAGTIASYGSVSGVMQSATLIPVKVLDNSGSGSLYGITQGILYAADIDADVINMSLGGGGYNQSMDEAVQTAVAQGTIVVAATGNDGASSISYPAAYSSVIAVGSVDSNRVRSSFSNYGSGLELMAPGSNIYSTYPNGRYRSLSGTSMATPHVAGVAGLIRAANPDIVVAQARQILRDTAQEAGSFTQYGYGIVDAHAAVVAASGGSGG

SEQ ID NO: 1177 - DNA, 1239 bp, synthetic construct
  misc_feature 1..1239: note = Variant of serine peptidase from Bacillus sinesaloumensis
  source 1..1239: mol_type = other DNA
atggcagatcaagctagtcaagctaatggaaaccaggacgtcattgaaggcgagctgatcgtttcagtggaaccgaagaacggtaaacctgatgtgagcattcaaagtgcacaatccgtaacagggcaggaagacgtccttaaatcgaaaggctttacgatcgttgataccttgcatgtagaggatagcagcgtcaagccactcgtctcgaagaatttcaataagaaagtggtggagaagatgggactggtgtatcttgttcaatactctccggaccagtttaaaagttccaacattgcgaagaaagaactcagaaaagaattgatggatctgggctttaaagtccgctatataagcgaaaattacaagatgatggcgatcgaaggtacagccactcttcagggggtgcaccctaaccaagtttgggcgtataatatgattaaagctccggaagcgtgggctattacgtctggatccctgagcgttaaagtagcagtcctggatacagggatcgaccataatcacccatccttggccaacttcgtgaatactaatcttggccgctcgtttgttggaggaaacaccatggatgttcaaggtcatggcacacatgttgctggcacgattgcatcttatgggagtgtaagcggagtgatgcagagtgcgacactgatcccggtcaaagtgctcgataattctggcagcgggtccctttacggtattacgcagggcatattgtatgccgccgacatcgatgcgtgtgtcattaacatgtctctgggtggaggaggctataatcagagcatggatgaggctgttcaaacagcagttgctcagggaaccattgtagtagcagcgactggcaatgatggtgcatcgtcgatcagttatcctgctgcctacagcagcgtcattgcggtgggatctgtggactccaatcgtgttcgatcctcgttttctaactatggatctgggcttgaactgatggcaccgggcagcaacatctacagtacgtatcctaatggcagatatcgcagtttgagtggtacaagcatggctactccgcacgttgcgggcgtagctgggctcattcgcgcagccaacccagacatagtggtcgcgcaagcccgtcagattctgcgggataccgcgcaagaagcaggatcgttcacacagtacggctatggaatcgtcgatgctcatgccgccgttgttgctgcatccggtggtagcggcggc

SEQ ID NO: 1178 - protein, 413 aa, synthetic construct
  REGION 1..413: note = Variant of serine peptidase from Bacillus sinesaloumensis
MADQASQANGNQDVIEGELIVSVEPKNGKPDVSIQSAQSVTGQEDVLKSKGFTIVDTLHVEDSSVKPLVSKNFNKKVVEKMGLVYLVQYSPDQFKSSNIAKKELRKELMDLGFKVRYISENYKMMAIEGTATLQGVHPNQVWAYNMIKAPEAWAITSGSLSVKVAVLDTGIDHNHPSLANFVNTNLGRSFVGGNTMDVQGHGTHVAGTIASYGSVSGVMQSATLIPVKVLDNSGSGSLYGITQGILYAADIDACVINMSLGGGGYNQSMDEAVQTAVAQGTIVVAATGNDGASSISYPAAYSSVIAVGSVDSNRVRSSFSNYGSGLELMAPGSNIYSTYPNGRYRSLSGTSMATPHVAGVAGLIRAANPDIVVAQARQILRDTAQEAGSFTQYGYGIVDAHAAVVAASGGSGG

SEQ ID NO: 1179 - DNA, 1239 bp, synthetic construct
  misc_feature 1..1239: note = Variant of serine peptidase from Bacillus sinesaloumensis
  source 1..1239: mol_type = other DNA
atggcagatcaagctagtcaagctaatggaaaccaggacgtcattgaaggcgagctgatcgtttcagtggaaccgaagaacggtaaacctgatgtgagcattcaaagtgcacaatccgtaacagggcaggaagacgtccttaaatcgaaaggctttacgatcgttgataccttgcatgtagaggatagcagcgtcaagccactcgtctcgaagaatttcaataagaaagtggtggagaagatgggactggtgtatcttgttcaatactctccggaccagtttaaaagttccaacattgcgaagaaagaactcagaaaagaattgatggatctgggctttaaagtccgctatataagcgaaaattacaagatgatggcgatcgaaggtacagccactcttcagggggtgcaccctaaccaagtttgggcgtatgagatgattaaagctccggaagcgtgggctattacgtctggatccctgagcgttaaagtagcagtcctggatacagggatcgaccataatcacccatccttggccaacttcgtgaatactaatcttggccgctcgtttgttggaggaaacaccatggatgttcaaggtcatggcacacatgttgctggcacgattgcatcttatgggagtgtaagcggagtgatgcagagtgcgacactgatcccggtcaaagtgctcgataattctggcagcgggtccctttacggtattacgcagggcatattgtatgccgccgacatcgatgcggacgtcattaacatgtctctgggtggaggaggctataatcagagcatggatgaggctgttcaaacagcagttgctcagggaaccattgtagtagcagcgactggcaatgatggtgcatcgtcgatcagttatcctgctgcctacagcagcgtcattgcggtgggatctgtggactccaatcgtgttcgatcctcgttttctaactatggatctgggcttgaactgatggcaccgggcagcaacatctacagtacgtatcctaatggcagatatcgcagtttgagtggtacaagcatggctactccgcacgttgcgggcgtagctgggctcattcgcgcagccaacccagacatagtggtcgcgcaagcccgtcagattctgcgggataccgcgcaagaagcaggatcgttcacacagtacggctatggaatcgtcgatgctcatgccgccgttgttgctgcatccggtggtagcggcggc

SEQ ID NO: 1180 - protein, 413 aa, synthetic construct
  REGION 1..413: note = Variant of serine peptidase from Bacillus sinesaloumensis
MADQASQANGNQDVIEGELIVSVEPKNGKPDVSIQSAQSVTGQEDVLKSKGFTIVDTLHVEDSSVKPLVSKNFNKKVVEKMGLVYLVQYSPDQFKSSNIAKKELRKELMDLGFKVRYISENYKMMAIEGTATLQGVHPNQVWAYEMIKAPEAWAITSGSLSVKVAVLDTGIDHNHPSLANFVNTNLGRSFVGGNTMDVQGHGTHVAGTIASYGSVSGVMQSATLIPVKVLDNSGSGSLYGITQGILYAADIDADVINMSLGGGGYNQSMDEAVQTAVAQGTIVVAATGNDGASSISYPAAYSSVIAVGSVDSNRVRSSFSNYGSGLELMAPGSNIYSTYPNGRYRSLSGTSMATPHVAGVAGLIRAANPDIVVAQARQILRDTAQEAGSFTQYGYGIVDAHAAVVAASGGSGG

SEQ ID NO: 1181 - DNA, 1239 bp, synthetic construct
  misc_feature 1..1239: note = Variant of serine peptidase from Bacillus sinesaloumensis
  source 1..1239: mol_type = other DNA
atggcagatcaagctagtcaagctaatggaaaccaggacgtcattgaaggcgagctgatcgtttcagtggaaccgaagaacggtaaacctgatgtgagcattcaaagtgcacaatccgtaacagggcaggaagacgtccttaaatcgaaaggctttacgatcgttgataccttgcatgtagaggatagcagcgtcaagccactcgtctcgaagaatttcaataagaaagtggtggagaagatgggactggtgtatcttgttcaatactctccggaccagtttaaaagttccaacattgcgaagaaagaactcagaaaagaattgatggatctgggctttaaagtccgctatataagcgaaaattacaagatgatggcgatcgaaggtacagccactcttcagggggtgcaccctaaccaagtttgggcgtataatatgattaaagctccggaagcgtgggctattacgtctggatccctgagcgttaaagtagcagtcctggatacagggatcgaccataatcacccatccttggccaacttcgtgaatactaatcttggccgctcgtttgttggaggaaacaccatggatgttcaaggtcatggcacacatgttgctggcacgattgcatcttatgggagtgtaagcggagtgatgcagagtgcgacactgatcccggtcaaagtgctcgataattctggcagcgggtccctttacggtattacgcagggcatattgtatgccgccgacatcgatgcggacgtcattaacatgtctctgggtggaggaggctataatcagagcatggatgaggctgttcaaacagcagttgttcagggaaccattgtagtagcagcgactggcaatgatggtgcatcgtcgatcagttatcctgctgcctacagcagcgtcattgcggtgggatctgtggactccaatcgtgttcgatcctcgttttctaactatggatctgggcttgaactgatggcaccgggcagcaacatctacagtacgtatcctaatggcagatatcgcagtttgagtggtacaagcatggctactccgcacgttgcgggcgtagctgggctcattcgcgcagccaacccagacatagtggtcgcgcaagcccgtcagattctgcgggataccgcgcaagaagcaggatcgttcacacagtacggctatggaatcgtcgatgctcatgccgccgttgttgctgcatccggtggtagcggcggc

SEQ ID NO: 1182 - protein, 413 aa, synthetic construct
  REGION 1..413: note = Variant of serine peptidase from Bacillus sinesaloumensis
MADQASQANGNQDVIEGELIVSVEPKNGKPDVSIQSAQSVTGQEDVLKSKGFTIVDTLHVEDSSVKPLVSKNFNKKVVEKMGLVYLVQYSPDQFKSSNIAKKELRKELMDLGFKVRYISENYKMMAIEGTATLQGVHPNQVWAYNMIKAPEAWAITSGSLSVKVAVLDTGIDHNHPSLANFVNTNLGRSFVGGNTMDVQGHGTHVAGTIASYGSVSGVMQSATLIPVKVLDNSGSGSLYGITQGILYAADIDADVINMSLGGGGYNQSMDEAVQTAVVQGTIVVAATGNDGASSISYPAAYSSVIAVGSVDSNRVRSSFSNYGSGLELMAPGSNIYSTYPNGRYRSLSGTSMATPHVAGVAGLIRAANPDIVVAQARQILRDTAQEAGSFTQYGYGIVDAHAAVVAASGGSGG

SEQ ID NO: 1183 - DNA, 1239 bp, synthetic construct
  misc_feature 1..1239: note = Variant of serine peptidase from Bacillus sinesaloumensis
  source 1..1239: mol_type = other DNA
atggcagatcaagctagtcaagctaatggaaaccaggacgtcattgaaggcgagctgatcgtttcagtggaaccgaagaacggtaaacctgatgtgagcattcaaagtgcacaatccgtaacagggcaggaagacgtccttaaatcgaaaggctttacgatcgttgataccttgcatgtagaggatagcagcgtcaagccactcgtctcgaagaatttcaataagaaagtggtggagaagatgggactggtgtatcttgttcaatactctccggaccagtttaaaagttccaacattgcgaagaaagaactcagaaaagaattgatggatctgggctttaaagtccgctatataagcgaaaattacaagatgatggcgatcgaaggtacagccactcttcaggggatgcaccctaaccaagtttgggcgtataatatgattaaagctccggaagcgtgggctattacgtctggatccctgagcgttaaagtagcagtcctggatacagggatcgaccataatcacccatccttggccaacttcgtgaatactaatcttggccgctcgtttgttggaggaaacaccatggatgttcaaggtcatggcacacatgttgctggcacgattgcatcttatgggagtgtaagcggagtgatgcagagtgcgacactgatcccggtcaaagtgctcgataattctggcagcgggtccctttacggtattacgcagggcatattgtatgccgccgacatcgatgcggacgtcattaacatgtctctgggtggaggaggctataatcagagcatggatgaggctgttcaaacagcagttgctcagggaaccattgtagtagcagcgactggcaatgatggtgcatcgtcgatcagttatcctgctgcctacagcagcgtcattgcggtgggatctgtggactccaatcgtgttcgatcctcgttttctaactatggatctgggcttgaactgatggcaccgggcagcaacatctacagtacgtatcctaatggcagatatcgcagtttgagtggtacaagcatggctactccgcacgttgcgggcgtagctgggctcattcgcgcagccaacccagacatagtggtcgcgcaagcccgtcagattctgcgggataccgcgcaagaagcaggatcgttcacacagtacggctatggaatcgtcgatgctcatgccgccgttgttgctgcatccggtggtagcggcggc

SEQ ID NO: 1184 - protein, 413 aa, synthetic construct
  REGION 1..413: note = Variant of serine peptidase from Bacillus sinesaloumensis
MADQASQANGNQDVIEGELIVSVEPKNGKPDVSIQSAQSVTGQEDVLKSKGFTIVDTLHVEDSSVKPLVSKNFNKKVVEKMGLVYLVQYSPDQFKSSNIAKKELRKELMDLGFKVRYISENYKMMAIEGTATLQGMHPNQVWAYNMIKAPEAWAITSGSLSVKVAVLDTGIDHNHPSLANFVNTNLGRSFVGGNTMDVQGHGTHVAGTIASYGSVSGVMQSATLIPVKVLDNSGSGSLYGITQGILYAADIDADVINMSLGGGGYNQSMDEAVQTAVAQGTIVVAATGNDGASSISYPAAYSSVIAVGSVDSNRVRSSFSNYGSGLELMAPGSNIYSTYPNGRYRSLSGTSMATPHVAGVAGLIRAANPDIVVAQARQILRDTAQEAGSFTQYGYGIVDAHAAVVAASGGSGG

SEQ ID NO: 1185 - DNA, 1239 bp, synthetic construct
  misc_feature 1..1239: note = Variant of serine peptidase from Bacillus sinesaloumensis
  source 1..1239: mol_type = other DNA
atggcagatcaagctagtcaagctaatggaaaccaggacgtcattgaaggcgagctgatcgtttcagtggaaccgaagaacggtaaacctgatgtgagcattcaaagtgcacaatccgtaacagggcaggaagacgtccttaaatcgaaaggctttacgatcgttgataccttgcatgtagaggatagcagcgtcaagccactcgtctcgaagaatttcaataagaaagtggtggagaagatgggactggtgtatcttgttcaatactctccggaccagtttaaaagttccaacattgcgaagaaagaactcagaaaagaattgatggatctgggctttaaagtccgctatataagcgaaaattacaagatgatggcgatcgaaggtacagccactcttcagggggtgcaccctaaccaagtttgggcgtataatatgattaaagctccggaagcgtggttgattacgtctggatccctgagcgttaaagtagcagtcctggatacagggatcgaccataatcacccatccttggccaacttcgtgaatactaatcttggccgctcgtttgttggaggaaacaccatggatgttcaaggtcatggcacacatgttgctggcacgattgcatcttatgggagtgtaagcggagtgatgcagagtgcgacactgatcccggtcaaagtgctcgataattctggcagcgggtccctttacggtattacgcagggcatattgtatgccgccgacatcgatgcggacgtcattaacatgtctctgggtggaggaggctataatcagagcatggatgaggctgttcaaacagcagttgctcagggaaccattgtagtagcagcgactggcaatgatggtgcatcgtcgatcagttatcctgctgcctacagcagcgtcattgcggtgggatctgtggactccaatcgtgttcgatcctcgttttctaactatggatctgggcttgaactgatggcaccgggcagcaacatctacagtacgtatcctaatggcagatatcgcagtttgagtggtacaagcatggctactccgcacgttgcgggcgtagctgggctcattcgcgcagccaacccagacatagtggtcgcgcaagcccgtcagattctgcgggataccgcgcaagaagcaggatcgttcacacagtacggctatggaatcgtcgatgctcatgccgccgttgttgctgcatccggtggtagcggcgac

SEQ ID NO: 1186 - protein, 413 aa, synthetic construct
  REGION 1..413: note = Variant of serine peptidase from Bacillus sinesaloumensis
MADQASQANGNQDVIEGELIVSVEPKNGKPDVSIQSAQSVTGQEDVLKSKGFTIVDTLHVEDSSVKPLVSKNFNKKVVEKMGLVYLVQYSPDQFKSSNIAKKELRKELMDLGFKVRYISENYKMMAIEGTATLQGVHPNQVWAYNMIKAPEAWLITSGSLSVKVAVLDTGIDHNHPSLANFVNTNLGRSFVGGNTMDVQGHGTHVAGTIASYGSVSGVMQSATLIPVKVLDNSGSGSLYGITQGILYAADIDADVINMSLGGGGYNQSMDEAVQTAVAQGTIVVAATGNDGASSISYPAAYSSVIAVGSVDSNRVRSSFSNYGSGLELMAPGSNIYSTYPNGRYRSLSGTSMATPHVAGVAGLIRAANPDIVVAQARQILRDTAQEAGSFTQYGYGIVDAHAAVVAASGGSGD

SEQ ID NO: 1187 - DNA, 1239 bp, synthetic construct
  misc_feature 1..1239: note = Variant of serine peptidase from Bacillus sinesaloumensis
  source 1..1239: mol_type = other DNA
atggcagatcaagctagtcaagctaatggaaaccaggacgtcattgaaggcgagctgatcgtttcagtggaaccgaagaacggtaaacctgatgtgagcattcaaagtgcacaatccgtaacagggcaggaagacgtccttaaatcgaaaggctttacgatcgttgataccttgcatgtagaggatagcagcgtcaagccactcgtctcgaagaatttcaataagaaagtggtggagaagatgggactggtgtatcttgttcaatactctccggaccagtttaaaagttccaacattgcgaagaaagaactcagaaaagaattgatggatctgggctttaaagtccgctatataagcgaaaattacaagatgatggcgatcgaaggtacagccactcttcagggggtgcaccctaaccaagtttgggcgtataatatgattaaagctccggaagcgtgggctattacgtctggatccctgagcgttaaagtagcagtcctggatacagggatcgaccataatcacccatccttggccaacttcgtgaatactaatcttggccgctcgtttgttggaggaaacaccatggatgttcaaggtcatggcacacatgttgctggcacgattgcatcttatgggagtgtaagcggagtgatgcagagtgcgacactgatcccggtcaaagtgctcgataattctggcagcgggtccctttacggtattacgcagggcatattgtatgccgccgacatcgatgcggacgtcattaacatgtctctgggtggaggaggctataatcagagcatggatgaggctgttcaaacagcagttgctcagggaaccattgtagtagcagcgactggcaatgatggtgcatcggtgatcagttatcctgctgcctacagcagcgtcattgcggtgggatctgtggactccaatcgtgttcgatcctcgttttctaactatggatctgggcttgaactgatggcaccgggcagcaacatctacagtacgtatcctaatggcagatatcgcagtttgagtggtacaagcatggctactccgcacgttgcgggcgtagctgggctcattcgcgcagccaacccagacatagtggtcgcgcaagcccgtcagattctgcgggataccgcgcaagaagcaggatcgttcacacagtacggctatggaatcgtcgatgctcatgccgccgttgttgctgcatccggtggtagcggcggc

SEQ ID NO: 1188 - protein, 413 aa, synthetic construct
  REGION 1..413: note = Variant of serine peptidase from Bacillus sinesaloumensis
MADQASQANGNQDVIEGELIVSVEPKNGKPDVSIQSAQSVTGQEDVLKSKGFTIVDTLHVEDSSVKPLVSKNFNKKVVEKMGLVYLVQYSPDQFKSSNIAKKELRKELMDLGFKVRYISENYKMMAIEGTATLQGVHPNQVWAYNMIKAPEAWAITSGSLSVKVAVLDTGIDHNHPSLANFVNTNLGRSFVGGNTMDVQGHGTHVAGTIASYGSVSGVMQSATLIPVKVLDNSGSGSLYGITQGILYAADIDADVINMSLGGGGYNQSMDEAVQTAVAQGTIVVAATGNDGASVISYPAAYSSVIAVGSVDSNRVRSSFSNYGSGLELMAPGSNIYSTYPNGRYRSLSGTSMATPHVAGVAGLIRAANPDIVVAQARQILRDTAQEAGSFTQYGYGIVDAHAAVVAASGGSGG

SEQ ID NO: 1189 - DNA, 1239 bp, synthetic construct
  misc_feature 1..1239: note = Variant of serine peptidase from Bacillus sinesaloumensis
  source 1..1239: mol_type = other DNA
atggcagatcaagctagtcaagctaatggaaaccaggacgtcattgaaggcgagctgatcgtttcagtggaaccgaagaacggtaaacctgatgtgagcattcaaagtgcacaatccgtaacagggcaggaagacgtccttaaatcgaaaggctttacgatcgttgataccttgcatgtagaggatagcagcgtcaagccactcgtctcgaagaatttcaataagaaagtggtggagaagatgggactggtgtatcttgttcaatactctccggaccagtttaaaagttccaacattgcgaagaaagaactcagaaaagaattgatggatctgggctttaaagtccgctatataagcgaaaattacaagatgatggcgatcgaaggtacagccactcttcagggggtgcaccctaaccaagtttgggcgtataatatgattaaagctccggaagcgtggaggattacgtctggatccctgagcgttaaagtagcagtcctggatacagggatcgaccataatcacccatccttggccaacttcgtgaatactaatcttggccgctcgtttgttggaggaaacaccatggatgttcaaggtcatggcacacatgttgctggcacgattgcatcttatgggagtgtaagcggagtgatgcagagtgcgacactgatcccggtcaaagtgctcgataattctggcagcgggtccctttacggtattacgcagggcatattgtatgccgccgacatcgatgcggacgtcattaacatgtctctgggtggaggaggctataatcagagcatggatgaggctgttcaaacagcagttgctcagggaaccattgtagtagcagcgactggcaatgatggtgcatcgtcgatcagttatcctgctgcctacagcagcgtcattgcggtgggatctgtggactccaatcgtgttcgatcctcgttttctaactatggatctgggcttgaactgatggcaccgggcagcaacatctacagtacgtatcctaatggcagatatcgcagtttgagtggtacaagcatggctactccgcacgttgcgggcgtagctgggctcattcgcgcagccaacccagacatagtggtcgcgcaagcccgtcagattctgcgggataccgcgcaagaagcaggatcgttcacacagtacggctatggaatcgtcgatgctcatgccgccgttgttgctgcatccggtggtagcggcggc

SEQ ID NO: 1190 - protein, 413 aa, synthetic construct
  REGION 1..413: note = Variant of serine peptidase from Bacillus sinesaloumensis
MADQASQANGNQDVIEGELIVSVEPKNGKPDVSIQSAQSVTGQEDVLKSKGFTIVDTLHVEDSSVKPLVSKNFNKKVVEKMGLVYLVQYSPDQFKSSNIAKKELRKELMDLGFKVRYISENYKMMAIEGTATLQGVHPNQVWAYNMIKAPEAWRITSGSLSVKVAVLDTGIDHNHPSLANFVNTNLGRSFVGGNTMDVQGHGTHVAGTIASYGSVSGVMQSATLIPVKVLDNSGSGSLYGITQGILYAADIDADVINMSLGGGGYNQSMDEAVQTAVAQGTIVVAATGNDGASSISYPAAYSSVIAVGSVDSNRVRSSFSNYGSGLELMAPGSNIYSTYPNGRYRSLSGTSMATPHVAGVAGLIRAANPDIVVAQARQILRDTAQEAGSFTQYGYGIVDAHAAVVAASGGSGG

SEQ ID NO: 1191 - DNA, 1239 bp, synthetic construct
  misc_feature 1..1239: note = Variant of serine peptidase from Bacillus sinesaloumensis
  source 1..1239: mol_type = other DNA
atggcagatcaagctagtcaagctaatggaaaccaggacgtcattgaaggcgagctgatcgtttcagtggaaccgaagaacggtaaacctgatgtgagcattcaaagtgcacaatccgtaacagggcaggaagacgtccttaaatcgaaaggctttacgatcgttgataccttgcatgtagaggatagcagcgtcaagccactcgtctcgaagaatttcaataagaaagtggtggagaagatgggactggtgtatcttgttcaatactctccggaccagtttaaaagttccaacattgcgaagaaagaactcagaaaagaattgatggatctgggctttaaagtccgctatataagcgaaaattacaagatgatggcgatcgaaggtacagccactcttcagggggtgcaccctaaccaagtttgggcgtataatatgattaaagctccggaagcgtgggctattacgtctggatccctgagcgttaaagtagcagtcctggatacagggatcgaccataatcacccatccttggccaacttcgtgaatactaatcttggccgctcgtttgttggaggaaacaccatggatgttcaaggtcatggcacacatgttgctggcacgattgcatcttatgggagtgtaagcggagtgatgcagagtgcgacactgatcccggtcaaagtgctcgataattctggcagcggggcgctttacggtattacgcagggcatattgtatgccgccgacatcgatgcggacgtcattaacatgtctctgggtggaggaggctataatcagagcatggatgaggctgttcaaacagcagttgctcagggaaccattgtagtagcagcgactggcaatgatggtgcatcgtcgatcagttatcctgctgcctacagcagcgtcattgcggtgggatctgtggactccaatcgtgttcgatcctcgttttctaactatggatctgggcttgaactgatggcaccgggcagcaacatctacagtacgtatcctaatggcagatatcgcagtttgagtggtacaagcatggctactccgcacgttgcgggcgtagctgggctcattcgcgcagccaacccagacatagtggtcgcgcaagcccgtcagattctgcgggataccgcgcaagaagcaggatcgttcacacagtacggctatggaatcgtcgatgctcatgccgccgttgttgctgcatccggtggtagcggcggc

SEQ ID NO: 1192 - protein, 413 aa, synthetic construct
  REGION 1..413: note = Variant of serine peptidase from Bacillus sinesaloumensis
MADQASQANGNQDVIEGELIVSVEPKNGKPDVSIQSAQSVTGQEDVLKSKGFTIVDTLHVEDSSVKPLVSKNFNKKVVEKMGLVYLVQYSPDQFKSSNIAKKELRKELMDLGFKVRYISENYKMMAIEGTATLQGVHPNQVWAYNMIKAPEAWAITSGSLSVKVAVLDTGIDHNHPSLANFVNTNLGRSFVGGNTMDVQGHGTHVAGTIASYGSVSGVMQSATLIPVKVLDNSGSGALYGITQGILYAADIDADVINMSLGGGGYNQSMDEAVQTAVAQGTIVVAATGNDGASSISYPAAYSSVIAVGSVDSNRVRSSFSNYGSGLELMAPGSNIYSTYPNGRYRSLSGTSMATPHVAGVAGLIRAANPDIVVAQARQILRDTAQEAGSFTQYGYGIVDAHAAVVAASGGSGG

SEQ ID NO: 1193 - DNA, 1239 bp, synthetic construct
  misc_feature 1..1239: note = Variant of serine peptidase from Bacillus sinesaloumensis
  source 1..1239: mol_type = other DNA
atggcagatcaagctagtcaagctaatggaaaccaggacgtcattgaaggcgagctgatcgtttcagtggaaccgaagaacggtaaacctgatgtgagcattcaaagtgcacaatccgtaacagggcaggaagacgtccttaaatcgaaaggctttacgatcgttgataccttgcatgtagaggatagcagcgtcaagccactcgtctcgaagaatttcaataagaaagtggtggagaagatgggactggtgtatcttgttcaatactctccggaccagtttaaaagttccaacattgcgaagaaagaactcagaaaagaattgatggatctgggctttaaagtccgctatataagcgaaaattacaagatgatggcgatcgaaggtacagccactcttcagggggtgcaccctaaccaagtttgggcgtataatatgattaaagctccggaagcgtgggctattacgtctggatccctgagcgttaaagtagcagtcctggatacagggatcgaccataatcacccatccttggccaacttcgtgaatactaatcttggccgctcgtttgttggaggaaacaccatggatgttcaaggtcatggcacacatgttgctggcacgattgcatcttatgggagtgtaagcggagtgatgcagagtgcgacactgatcccggtcaaagtgctcgataattctggcagcgggtccctttacggtattacgcagggcatattgtatgccgccgacatcgatgcggacgtcattaacatgtctctgggtggaggaggctataatcagagcatggatgaggctgttggtacagcagttgctcagggaaccattgtagtagcagcgactggcaatgatggtgcatcgtcgatcagttatcctgctgcctacagcagcgtcattgcggtgggatctgtggactccaatcgtgttcgatcctcgttttctaactatggatctgggcttgaactgatggcaccgggcagcaacatctacagtacgtatcctaatggcagatatcgcagtttgagtggtacaagcatggctactccgcacgttgcgggcgtagctgggctcattcgcgcagccaacccagacatagtggtcgcgcaagcccgtcagattctgcgggataccgcgcaagaagcaggatcgttcacacagtacggctatggaatcgtcgatgctcatgccgccgttgttgctgcatccggtggtagcggcggc

SEQ ID NO: 1194 - protein, 413 aa, synthetic construct
  REGION 1..413: note = Variant of serine peptidase from Bacillus sinesaloumensis
MADQASQANGNQDVIEGELIVSVEPKNGKPDVSIQSAQSVTGQEDVLKSKGFTIVDTLHVEDSSVKPLVSKNFNKKVVEKMGLVYLVQYSPDQFKSSNIAKKELRKELMDLGFKVRYISENYKMMAIEGTATLQGVHPNQVWAYNMIKAPEAWAITSGSLSVKVAVLDTGIDHNHPSLANFVNTNLGRSFVGGNTMDVQGHGTHVAGTIASYGSVSGVMQSATLIPVKVLDNSGSGSLYGITQGILYAADIDADVINMSLGGGGYNQSMDEAVGTAVAQGTIVVAATGNDGASSISYPAAYSSVIAVGSVDSNRVRSSFSNYGSGLELMAPGSNIYSTYPNGRYRSLSGTSMATPHVAGVAGLIRAANPDIVVAQARQILRDTAQEAGSFTQYGYGIVDAHAAVVAASGGSGG

SEQ ID NO: 1195 - DNA, 1239 bp, synthetic construct
  misc_feature 1..1239: note = Variant of serine peptidase from Bacillus sinesaloumensis
  source 1..1239: mol_type = other DNA
atggcagatcaagctagtcaagctaatggaaaccaggacgtcattgaaggcgagctgatcgtttcagtggaaccgaagaacggtaaacctgatgtgagcattcaaagtgcacaatccgtaacagggcaggaagacgtccttaaatcgaaaggctttacgatcgttgataccttgcatgtagaggatagcagcgtcaagccactcgtctcgaagaatttcaataagaaagtggtggagaagatgggactggtgtatcttgttcaatactctccggaccagtttaaaagttccaacattgcgaagaaagaactcagaaaagaattgatggatctgggctttaaagtccgctatataagcgaaaattacaagatgatggcgatcgaaggtacagccactcttcagggggtgaatcctaaccaagtttgggcgtataatatgattaaagctccggaagcgtgggctattacgtctggatccctgagcgttaaagtagcagtcctggatacagggatcgaccataatcacccatccttggccaacttcgtgaatactaatcttggccgctcgtttgttggaggaaacaccatggatgttcaaggtcatggcacacatgttgctggcacgattgcatcttatgggagtgtaagcggagtgatgcagagtgcgacactgatcccggtcaaagtgctcgataattctggcagcgggtccctttacggtattacgcagggcatattgtatgccgccgacatcgatgcggacgtcattaacatgtctctgggtggaggaggctataatcagagcatggatgaggctgttcaaacagcagttgctcagggaaccattgtagtagcagcgactggcaatgatggtgcatcgtcgatcagttatcctgctgcctacagcagcgtcattgcggtgggatctgtggactccaatcgtgttcgatcctcgttttctaactatggatctgggcttgaactgatggcaccgggcagcaacatctacagtacgtatcctaatggcagatatcgcagtttgagtggtacaagcatggctactccgcacgttgcgggcgtagctgggctcattcgcgcagccaacccagacatagtggtcgcgcaagcccgtcagattctgcgggataccgcgcaagaagcaggatcgttcacacagtacggctatggaatcgtcgatgctcatgccgccgttgttgctgcatccggtggtagcggcggc

SEQ ID NO: 1196 - protein, 413 aa, synthetic construct
  REGION 1..413: note = Variant of serine peptidase from Bacillus sinesaloumensis
MADQASQANGNQDVIEGELIVSVEPKNGKPDVSIQSAQSVTGQEDVLKSKGFTIVDTLHVEDSSVKPLVSKNFNKKVVEKMGLVYLVQYSPDQFKSSNIAKKELRKELMDLGFKVRYISENYKMMAIEGTATLQGVNPNQVWAYNMIKAPEAWAITSGSLSVKVAVLDTGIDHNHPSLANFVNTNLGRSFVGGNTMDVQGHGTHVAGTIASYGSVSGVMQSATLIPVKVLDNSGSGSLYGITQGILYAADIDADVINMSLGGGGYNQSMDEAVQTAVAQGTIVVAATGNDGASSISYPAAYSSVIAVGSVDSNRVRSSFSNYGSGLELMAPGSNIYSTYPNGRYRSLSGTSMATPHVAGVAGLIRAANPDIVVAQARQILRDTAQEAGSFTQYGYGIVDAHAAVVAASGGSGG

SEQ ID NO: 1197 - DNA, 1239 bp, synthetic construct
  misc_feature 1..1239: note = Variant of serine peptidase from Bacillus sinesaloumensis
  source 1..1239: mol_type = other DNA
atggcagatcaagctagtcaagctaatggaaaccaggacgtcattgaaggcgagctgatcgtttcagtggaaccgaagaacggtaaacctgatgtgagcattcaaagtgcacaatccgtaacagggcaggaagacgtccttaaatcgaaaggctttacgatcgttgataccttgcatgtagaggatagcagcgtcaagccactcgtctcgaagaatttcaataagaaagtggtggagaagatgggactggtgtatcttgttcaatactctccggaccagtttaaaagttccaacattgcgaagaaagaactcagaaaagaattgatggatctgggctttaaagtccgctatataagcgaaaattacaagatgatggcgatcgaaggtacagccactcttcagggggtgcaccctaaccaagtttgggcgtataatatgattaaagctccggaagcgtgggctattacgtctggatccctgagcgttaaagtagcagtcctggatacagggatcgaccataatcacccatccttggccaacttcgtgaatactaatcttggccgctcgtttgttggaggaaacaccatggatgttcaaggtcatggcacacatgttgctggcacgattgcatcttatgggagtgtaagcggagtgatgcagagtgcgacactgatcccggtcaaagtgctcgataattctggcagcgggtccctttacggtattacgcagggcatattgtatgccgccgacatcgatgcggacgtcattaacatgtctctgggtggaggaccttataatcagagcatggatgaggctgttcaaacagcagttgctcagggaaccattgtagtagcagcgactggcaatgatggtgcatcgtcgatcagttatcctgctgcctacagcagcgtcattgcggtgggatctgtggactccaatcgtgttcgatcctcgttttctaactatggatctgggcttgaactgatggcaccgggcagcaacatctacagtacgtatcctaatggcagatatcgcagtttgagtggtacaagcatggctactccgcacgttgcgggcgtagctgggctcattcgcgcagccaacccagacatagtggtcgcgcaagcccgtcagattctgcgggataccgcgcaagaagcaggatcgttcacacagtacggctatggaatcgtcgatgctcatgccgccgttgttgctgcatccggtggtagcggcggc

SEQ ID NO: 1198 - protein, 413 aa, synthetic construct
  REGION 1..413: note = Variant of serine peptidase from Bacillus sinesaloumensis
MADQASQANGNQDVIEGELIVSVEPKNGKPDVSIQSAQSVTGQEDVLKSKGFTIVDTLHVEDSSVKPLVSKNFNKKVVEKMGLVYLVQYSPDQFKSSNIAKKELRKELMDLGFKVRYISENYKMMAIEGTATLQGVHPNQVWAYNMIKAPEAWAITSGSLSVKVAVLDTGIDHNHPSLANFVNTNLGRSFVGGNTMDVQGHGTHVAGTIASYGSVSGVMQSATLIPVKVLDNSGSGSLYGITQGILYAADIDADVINMSLGGGPYNQSMDEAVQTAVAQGTIVVAATGNDGASSISYPAAYSSVIAVGSVDSNRVRSSFSNYGSGLELMAPGSNIYSTYPNGRYRSLSGTSMATPHVAGVAGLIRAANPDIVVAQARQILRDTAQEAGSFTQYGYGIVDAHAAVVAASGGSGG

SEQ ID NO: 1199 - DNA, 1239 bp, synthetic construct
  misc_feature 1..1239: note = Variant of serine peptidase from Bacillus sinesaloumensis
  source 1..1239: mol_type = other DNA
atggcagatcaagctagtcaagctaatggaaaccaggacgtcattgaaggcgagctgatcgtttcagtggaaccgaagaacggtaaacctgatgtgagcattcaaagtgcacaatccgtaacagggcaggaagacgtccttaaatcgaaaggctttacgatcgttgataccttgcatgtagaggatagcagcgtcaagccactcgtctcgaagaatttcaataagaaagtggtggagaagatgggactggtgtatcttgttcaatactctccggaccagtttaaaagttccaacattgcgaagaaagaactcagaaaagaattgatggatctgggctttaaagtccgctatataagcgaaaattacaagatgatggcgatcgaaggtacagccactcttcagggggtgcaccctaaccaagtttgggcgtataatatgattaaagctccggaagcgtgggctattacgtctggatccctgagcgttaaagtagcagtcctggatacagggatcgaccataatcacccatccttggccaacttcgtgaatactaatcttggccgctcgtttgttggaggaaacaccatggatgttcaaggtcatggcacacatgttgctggcacgattgcatcttatgggagtgtaagcggagtgatgcagagtgcgacactgatcccggtcaaagtgctcgataattctggcagcgggtccctttacggtattacgcagggcatattgtatgccgccgacatcgatgcggacgtcattaacatgtctctgggtggaggaggctataatcagagcatggatgaggctgttacgacagcagttgctcagggaaccattgtagtagcagcgactggcaatgatggtgcatcgtcgatcagttatcctgctgcctacagcagcgtcattgcggtgggatctgtggactccaatcgtgttcgatcctcgttttctaactatggatctgggcttgaactgatggcaccgggcagcaacatctacagtacgtatcctaatggcagatatcgcagtttgagtggtacaagcatggctactccgcacgttgcgggcgtagctgggctcattcgcgcagccaacccagacatagtggtcgcgcaagcccgtcagattctgcgggataccgcgcaagaagcaggatcgttcacacagtacggctatggaatcgtcgatgctcatgccgccgttgttgctgcatccggtggtagcggcggc

SEQ ID NO: 1200 - protein, 413 aa, synthetic construct
  REGION 1..413: note = Variant of serine peptidase from Bacillus sinesaloumensis
MADQASQANGNQDVIEGELIVSVEPKNGKPDVSIQSAQSVTGQEDVLKSKGFTIVDTLHVEDSSVKPLVSKNFNKKVVEKMGLVYLVQYSPDQFKSSNIAKKELRKELMDLGFKVRYISENYKMMAIEGTATLQGVHPNQVWAYNMIKAPEAWAITSGSLSVKVAVLDTGIDHNHPSLANFVNTNLGRSFVGGNTMDVQGHGTHVAGTIASYGSVSGVMQSATLIPVKVLDNSGSGSLYGITQGILYAADIDADVINMSLGGGGYNQSMDEAVTTAVAQGTIVVAATGNDGASSISYPAAYSSVIAVGSVDSNRVRSSFSNYGSGLELMAPGSNIYSTYPNGRYRSLSGTSMATPHVAGVAGLIRAANPDIVVAQARQILRDTAQEAGSFTQYGYGIVDAHAAVVAASGGSGG

SEQ ID NO: 1201 - DNA, 1239 bp, synthetic construct
  misc_feature 1..1239: note = Variant of serine peptidase from Bacillus sinesaloumensis
  source 1..1239: mol_type = other DNA
atggcagatcaagctagtcaagctaatggaaaccaggacgtcattgaaggcgagctgatcgtttcagtggaaccgaagaacggtaaacctgatgtgagcattcaaagtgcacaatccgtaacagggcaggaagacgtccttaaatcgaaaggctttacgatcgttgataccttgcatgtagaggatagcagcgtcaagccactcgtctcgaagaatttcaataagaaagtggtggagaagatgggactggtgtatcttgttcaatactctccggaccagtttaaaagttccaacattgcgaagaaagaactcagaaaagaattgatggatctgggctttaaagtccgctatataagcgaaaattacaagatgatggcgatcgaaggtacagccactcttcagggggtgcaccctaaccaagtttgggcgtataatatgattaaagctccggaagcgtgggctattacgtctggatccctgagcgttaaagtagcagtcctggatacagggatcgaccataatcacccatccttggccaacttcgtgaatactaatcttggccgctcgtttgttggaggaaacaccatggatgttcaaggtcatggcacacatgttgctggcacgattgcatcttatgggagtgtaagcggagtgatgcagagtgcgacactgatcccggtcaaagtgctcgataattctggcagcgggtccctttacggtattacgcagggcatattgtatgccgccgacatcgatgcggacgtcattaacatgtctctgggtggaggaggctataatcagagcatggatgaggctgttcaaacagcagttaatcagggaaccattgtagtagcagcgactggcaatgatggtgcatcgtcgatcagttatcctgctgcctacagcagcgtcattgcggtgggatctgtggactccaatcgtgttcgatcctcgttttctaactatggatctgggcttgaactgatggcaccgggcagcaacatctacagtacgtatcctaatggcagatatcgcagtttgagtggtacaagcatggctactccgcacgttgcgggcgtagctgggctcattcgcgcagccaacccagacatagtggtcgcgcaagcccgtcagattctgcgggataccgcgcaagaagcaggatcgttcacacagtacggctatggaatcgtcgatgctcatgccgccgttgttgctgcatccggtggtagcggcggc

SEQ ID NO: 1202 - protein, 413 aa, synthetic construct
  REGION 1..413: note = Variant of serine peptidase from Bacillus sinesaloumensis
MADQASQANGNQDVIEGELIVSVEPKNGKPDVSIQSAQSVTGQEDVLKSKGFTIVDTLHVEDSSVKPLVSKNFNKKVVEKMGLVYLVQYSPDQFKSSNIAKKELRKELMDLGFKVRYISENYKMMAIEGTATLQGVHPNQVWAYNMIKAPEAWAITSGSLSVKVAVLDTGIDHNHPSLANFVNTNLGRSFVGGNTMDVQGHGTHVAGTIASYGSVSGVMQSATLIPVKVLDNSGSGSLYGITQGILYAADIDADVINMSLGGGGYNQSMDEAVQTAVNQGTIVVAATGNDGASSISYPAAYSSVIAVGSVDSNRVRSSFSNYGSGLELMAPGSNIYSTYPNGRYRSLSGTSMATPHVAGVAGLIRAANPDIVVAQARQILRDTAQEAGSFTQYGYGIVDAHAAVVAASGGSGG

SEQ ID NO: 1203 - DNA, 1239 bp, synthetic construct
  misc_feature 1..1239: note = Variant of serine peptidase from Bacillus sinesaloumensis
  source 1..1239: mol_type = other DNA
atggcagatcaagctagtcaagctaatggaaaccaggacgtcattgaaggcgagctgatcgtttcagtggaaccgaagaacggtaaacctgatgtgagcattcaaagtgcacaatccgtaacagggcaggaagacgtccttaaatcgaaaggctttacgatcgttgataccttgcatgtagaggatagcagcgtcaagccactcgtctcgaagaatttcaataagaaagtggtggagaagatgggactggtgtatcttgttcaatactctccggaccagtttaaaagttccaacattgcgaagaaagaactcagaaaagaattgatggatctgggctttaaagtccgctatataagcgaaaattacaagatgatggcgatcgaaggtacagccactcttcagggggtgcaccctaaccaagtttgggcgtataatatgattaaagctccggaagcgtgggctattacgtctggatccctgagcgttaaagtagcagtcctggatacagggatcgaccataatcacccatccttggccaacttcgtgaatactaatcttggccgctcgtttgttggaggaaacaccatggatgttcaaggtcatggcacacatgttgctggcacgattgcatcttatggggcggtaagcggagtgatgcagagtgcgacactgatcccggtcaaagtgctcgataattctggcagcgggtccctttacggtattacgcagggcatattgtatgccgccgacatcgatgcggacgtcattaacatgtctctgggtggaggaggctataatcagagcatggatgaggctgttcaaacagcagttgctcagggaaccattgtagtagcagcgactggcaatgatggtgcatcgtcgatcagttatcctgctgcctacagcagcgtcattgcggtgggatctgtggactccaatcgtgttcgatcctcgttttctaactatggatctgggcttgaactgatggcaccgggcagcaacatctacagtacgtatcctaatggcagatatcgcagtttgagtggtacaagcatggctactccgcacgttgcgggcgtagctgggctcattcgcgcagccaacccagacatagtggtcgcgcaagcccgtcagattctgcgggataccgcgcaagaagcaggatcgttcacacagtacggctatggaatcgtcgatgctcatgccgccgttgttgctgcatccggtggtagcggcggc

SEQ ID NO: 1204 - protein, 413 aa, synthetic construct
  REGION 1..413: note = Variant of serine peptidase from Bacillus sinesaloumensis
MADQASQANGNQDVIEGELIVSVEPKNGKPDVSIQSAQSVTGQEDVLKSKGFTIVDTLHVEDSSVKPLVSKNFNKKVVEKMGLVYLVQYSPDQFKSSNIAKKELRKELMDLGFKVRYISENYKMMAIEGTATLQGVHPNQVWAYNMIKAPEAWAITSGSLSVKVAVLDTGIDHNHPSLANFVNTNLGRSFVGGNTMDVQGHGTHVAGTIASYGAVSGVMQSATLIPVKVLDNSGSGSLYGITQGILYAADIDADVINMSLGGGGYNQSMDEAVQTAVAQGTIVVAATGNDGASSISYPAAYSSVIAVGSVDSNRVRSSFSNYGSGLELMAPGSNIYSTYPNGRYRSLSGTSMATPHVAGVAGLIRAANPDIVVAQARQILRDTAQEAGSFTQYGYGIVDAHAAVVAASGGSGG

SEQ ID NO: 1205 - DNA, 1239 bp, synthetic construct
  misc_feature 1..1239: note = Variant of serine peptidase from Bacillus sinesaloumensis
  source 1..1239: mol_type = other DNA
atggcagatcaagctagtcaagctaatggaaaccaggacgtcattgaaggcgagctgatcgtttcagtggaaccgaagaacggtaaacctgatgtgagcattcaaagtgcacaatccgtaacagggcaggaagacgtccttaaatcgaaaggctttacgatcgttgataccttgcatgtagaggatagcagcgtcaagccactcgtctcgaagaatttcaataagaaagtggtggagaagatgggactggtgtatcttgttcaatactctccggaccagtttaaaagttccaacattgcgaagaaagaactcagaaaagaattgatggatctgggctttaaagtccgctatataagcgaaaattacaagatgatggcgatcgaaggtacagccactcttcagggggtgcaccctaaccaagtttgggcgtataatatgattaaagctccggaagcgtgggctattacgtctggatccctgagcgttaaagtagcagtcctggatacagggatcgaccataatcacccatccttggccaacttcgtgaatactgggcttggccgctcgtttgttggaggaaacaccatggatgttcaaggtcatggcacacatgttgctggcacgattgcatcttatgggagtgtaagcggagtgatgcagagtgcgacactgatcccggtcaaagtgctcgataattctggcagcgggtccctttacggtattacgcagggcatattgtatgccgccgacatcgatgcggacgtcattaacatgtctctgggtggaggaggctataatcagagcatggatgaggctgttcaaacagcagttgctcagggaaccattgtagtagcagcgactggcaatgatggtgcatcgtcgatcagttatcctgctgcctacagcagcgtcattgcggtgggatctgtggactccaatcgtgttcgatcctcgttttctaactatggatctgggcttgaactgatggcaccgggcagcaacatctacagtacgtatcctaatggcagatatcgcagtttgagtggtacaagcatggctactccgcacgttgcgggcgtagctgggctcattcgcgcagccaacccagacatagtggtcgcgcaagcccgtcagattctgcgggataccgcgcaagaagcaggatcgttcacacagtacggctatggaatcgtcgatgctcatgccgccgttgttgctgcatccggtggtagcggcggc

SEQ ID NO: 1206 - protein, 413 aa, synthetic construct
  REGION 1..413: note = Variant of serine peptidase from Bacillus sinesaloumensis
MADQASQANGNQDVIEGELIVSVEPKNGKPDVSIQSAQSVTGQEDVLKSKGFTIVDTLHVEDSSVKPLVSKNFNKKVVEKMGLVYLVQYSPDQFKSSNIAKKELRKELMDLGFKVRYISENYKMMAIEGTATLQGVHPNQVWAYNMIKAPEAWAITSGSLSVKVAVLDTGIDHNHPSLANFVNTGLGRSFVGGNTMDVQGHGTHVAGTIASYGSVSGVMQSATLIPVKVLDNSGSGSLYGITQGILYAADIDADVINMSLGGGGYNQSMDEAVQTAVAQGTIVVAATGNDGASSISYPAAYSSVIAVGSVDSNRVRSSFSNYGSGLELMAPGSNIYSTYPNGRYRSLSGTSMATPHVAGVAGLIRAANPDIVVAQARQILRDTAQEAGSFTQYGYGIVDAHAAVVAASGGSGG

SEQ ID NO: 1207 - DNA, 1239 bp, synthetic construct
  misc_feature 1..1239: note = Variant of serine peptidase from Bacillus sinesaloumensis
  source 1..1239: mol_type = other DNA
atggcagatcaagctagtcaagctaatggaaaccaggacgtcattgaaggcgagctgatcgtttcagtggaaccgaagaacggtaaacctgatgtgagcattcaaagtgcacaatccgtaacagggcaggaagacgtccttaaatcgaaaggctttacgatcgttgataccttgcatgtagaggatagcagcgtcaagccactcgtctcgaagaatttcaataagaaagtggtggagaagatgggactggtgtatcttgttcaatactctccggaccagtttaaaagttccaacattgcgaagaaagaactcagaaaagaattgatggatctgggctttaaagtccgctatataagcgaaaattacaagatgatggcgatcgaaggtacagccactcttcagggggtgcaccctaaccaagtttgggcgtataatatgattaaagctccggaagcgtgggctattacgtctggatccctgagcgttaaagtagcagtcctggatacagggatcgaccataatcacccatccttggccaacttcgtgaatactaatcttggccgctcgtttgttggaggaaacaccatggatgttcaaggtcatggcacacatgttgctggcacgattgcatcttatggggttgtaagcggagtgatgcagagtgcgacactgatcccggtcaaagtgctcgataattctggcagcgggtccctttacggtattacgcagggcatattgtatgccgccgacatcgatgcggacgtcattaacatgtctctgggtggaggaggctataatcagagcatggatgaggctgttcaaacagcagttgctcagggaaccattgtagtagcagcgactggcaatgatggtgcatcgtcgatcagttatcctgctgcctacagcagcgtcattgcggtgggatctgtggactccaatcgtgttcgatcctcgttttctaactatggatctgggcttgaactgatggcaccgggcagcaacatctacagtacgtatcctaatggcagatatcgcagtttgagtggtacaagcatggctactccgcacgttgcgggcgtagctgggctcattcgcgcagccaacccagacatagtggtcgcgcaagcccgtcagattctgcgggataccgcgcaagaagcaggatcgttcacacagtacggctatggaatcgtcgatgctcatgccgccgttgttgctgcatccggtggtagcggcggc

SEQ ID NO: 1208 - protein, 413 aa, synthetic construct
  REGION 1..413: note = Variant of serine peptidase from Bacillus sinesaloumensis
MADQASQANGNQDVIEGELIVSVEPKNGKPDVSIQSAQSVTGQEDVLKSKGFTIVDTLHVEDSSVKPLVSKNFNKKVVEKMGLVYLVQYSPDQFKSSNIAKKELRKELMDLGFKVRYISENYKMMAIEGTATLQGVHPNQVWAYNMIKAPEAWAITSGSLSVKVAVLDTGIDHNHPSLANFVNTNLGRSFVGGNTMDVQGHGTHVAGTIASYGVVSGVMQSATLIPVKVLDNSGSGSLYGITQGILYAADIDADVINMSLGGGGYNQSMDEAVQTAVAQGTIVVAATGNDGASSISYPAAYSSVIAVGSVDSNRVRSSFSNYGSGLELMAPGSNIYSTYPNGRYRSLSGTSMATPHVAGVAGLIRAANPDIVVAQARQILRDTAQEAGSFTQYGYGIVDAHAAVVAASGGSGG

SEQ ID NO: 1209 - DNA, 1239 bp, synthetic construct
  misc_feature 1..1239: note = Variant of serine peptidase from Bacillus sinesaloumensis
  source 1..1239: mol_type = other DNA
atggcagatcaagctagtcaagctaatggaaaccaggacgtcattgaaggcgagctgatcgtttcagtggaaccgaagaacggtaaacctgatgtgagcattcaaagtgcacaatccgtaacagggcaggaagacgtccttaaatcgaaaggctttacgatcgttgataccttgcatgtagaggatagcagcgtcaagccactcgtctcgaagaatttcaataagaaagtggtggagaagatgggactggtgtatcttgttcaatactctccggaccagtttaaaagttccaacattgcgaagaaagaactcagaaaagaattgatggatctgggctttaaagtccgctatataagcgaaaattacaagatgatggcgatcgaaggtacagccactcttcagggggtgcaccctaaccaagtttgggcgtataatatgattaaagctccggaagcgtgggctattacgtctggatccctgagcgttaaagtagcagtcctggatacagggatcgaccataatcacccatccttggccaacttcgtgaatactaatcttggccgctcgtttgttggaggaaacaccatggatgttcaaggtcatggcacacatgttgctggcacgattgcatcttatgggagtgtaagcggagtgatgcagagtgcgacactgatcccggtcaaagtgctcgataattctggcagcgggtccctttacggtattacgcagggcatattgtatgccgccgacatcgatgcggacgtcattaacatgtctctgggtggaggaggctataatcagagcatggatgaggctgttcaaacagcagttgctacgggaaccattgtagtagcagcgactggcaatgatggtgcatcgtcgatcagttatcctgctgcctacagcagcgtcattgcggtgggatctgtggactccaatcgtgttcgatcctcgttttctaactatggatctgggcttgaactgatggcaccgggcagcaacatctacagtacgtatcctaatggcagatatcgcagtttgagtggtacaagcatggctactccgcacgttgcgggcgtagctgggctcattcgcgcagccaacccagacatagtggtcgcgcaagcccgtcagattctgcgggataccgcgcaagaagcaggatcgttcacacagtacggctatggaatcgtcgatgctcatgccgccgttgttgctgcatccggtggtagcggcggc

SEQ ID NO: 1210 - protein, 413 aa, synthetic construct
  REGION 1..413: note = Variant of serine peptidase from Bacillus sinesaloumensis
MADQASQANGNQDVIEGELIVSVEPKNGKPDVSIQSAQSVTGQEDVLKSKGFTIVDTLHVEDSSVKPLVSKNFNKKVVEKMGLVYLVQYSPDQFKSSNIAKKELRKELMDLGFKVRYISENYKMMAIEGTATLQGVHPNQVWAYNMIKAPEAWAITSGSLSVKVAVLDTGIDHNHPSLANFVNTNLGRSFVGGNTMDVQGHGTHVAGTIASYGSVSGVMQSATLIPVKVLDNSGSGSLYGITQGILYAADIDADVINMSLGGGGYNQSMDEAVQTAVATGTIVVAATGNDGASSISYPAAYSSVIAVGSVDSNRVRSSFSNYGSGLELMAPGSNIYSTYPNGRYRSLSGTSMATPHVAGVAGLIRAANPDIVVAQARQILRDTAQEAGSFTQYGYGIVDAHAAVVAASGGSGG

SEQ ID NO: 1211 - DNA, 1239 bp, synthetic construct
  misc_feature 1..1239: note = Variant of serine peptidase from Bacillus sinesaloumensis
  source 1..1239: mol_type = other DNA
atggcagatcaagctagtcaagctaatggaaaccaggacgtcattgaaggcgagctgatcgtttcagtggaaccgaagaacggtaaacctgatgtgagcattcaaagtgcacaatccgtaacagggcaggaagacgtccttaaatcgaaaggctttacgatcgttgataccttgcatgtagaggatagcagcgtcaagccactcgtctcgaagaatttcaataagaaagtggtggagaagatgggactggtgtatcttgttcaatactctccggaccagtttaaaagttccaacattgcgaagaaagaactcagaaaagaattgatggatctgggctttaaagtccgctatataagcgaaaattacaagatgatggcgatcgaaggtacagccactcttcagggggtgcaccctaaccaagtttgggcgtataatatgattaaagctccggaagcgtgggctattacgtctggatccctgagcgttaaagtagcagtcctggatacagggatcgaccataatcacccatccttggccaacttcgtgaatactaatcttggccgctcgtttgttggaggaaacaccatggatgttcaaggtcatggcacacatgttgctggcacgattgcatcttatgggagtgtaagcggagtgatgcagagtgcgacactgatcccggtcaaagtgctcgataattctggcagcgggtccctttacggtattacgcagggcatattgtatgccgccgacatcgatgcggacgtcattaacatgtctctgggtggaggaggctataatcagagcatggatgaggctgttcaaacagcaggggctcagggaaccattgtagtagcagcgactggcaatgatggtgcatcgtcgatcagttatcctgctgcctacagcagcgtcattgcggtgggatctgtggactccaatcgtgttcgatcctcgttttctaactatggatctgggcttgaactgatggcaccgggcagcaacatctacagtacgtatcctaatggcagatatcgcagtttgagtggtacaagcatggctactccgcacgttgcgggcgtagctgggctcattcgcgcagccaacccagacatagtggtcgcgcaagcccgtcagattctgcgggataccgcgcaagaagcaggatcgttcacacagtacggctatggaatcgtcgatgctcatgccgccgttgttgctgcatccggtggtagcggcggc

SEQ ID NO: 1212 - protein, 413 aa, synthetic construct
  REGION 1..413: note = Variant of serine peptidase from Bacillus sinesaloumensis
MADQASQANGNQDVIEGELIVSVEPKNGKPDVSIQSAQSVTGQEDVLKSKGFTIVDTLHVEDSSVKPLVSKNFNKKVVEKMGLVYLVQYSPDQFKSSNIAKKELRKELMDLGFKVRYISENYKMMAIEGTATLQGVHPNQVWAYNMIKAPEAWAITSGSLSVKVAVLDTGIDHNHPSLANFVNTNLGRSFVGGNTMDVQGHGTHVAGTIASYGSVSGVMQSATLIPVKVLDNSGSGSLYGITQGILYAADIDADVINMSLGGGGYNQSMDEAVQTAGAQGTIVVAATGNDGASSISYPAAYSSVIAVGSVDSNRVRSSFSNYGSGLELMAPGSNIYSTYPNGRYRSLSGTSMATPHVAGVAGLIRAANPDIVVAQARQILRDTAQEAGSFTQYGYGIVDAHAAVVAASGGSGG

SEQ ID NO: 1213 - DNA, 1239 bp, synthetic construct
  misc_feature 1..1239: note = Variant of serine peptidase from Bacillus sinesaloumensis
  source 1..1239: mol_type = other DNA
atggcagatcaagctagtcaagctaatggaaaccaggacgtcattgaaggcgagctgatcgtttcagtggaaccgaagaacggtaaacctgatgtgagcattcaaagtgcacaatccgtaacagggcaggaagacgtccttaaatcgaaaggctttacgatcgttgataccttgcatgtagaggatagcagcgtcaagccactcgtctcgaagaatttcaataagaaagtggtggagaagatgggactggtgtatcttgttcaatactctccggaccagtttaaaagttccaacattgcgaagaaagaactcagaaaagaattgatggatctgggctttaaagtccgctatataagcgaaaattacaagatgatggcgatcgaaggtacagccactcttcagggggtgcaccctaaccaagtttgggcgtataatatgattaaagctccggaagcgtgggctattacgtctggatccctgagcgttaaagtagcagtcctggatacagggatcgaccataatcacccatccttggccaacttcgtgaatactaatcttggccgctcgtttgttggaggaaacaccatggatgttcaaggtcatggcacacatgttgctggcacgattgcatcttatgggagtgtaagcggagtgatgcagagtgcgacactgatcccggtcaaagtgctcgataattctggcagcgggtccctttacggtattacgcagggcatattgtatgccgccgacatcgatgcggacgtcattaacatgtctctgggtggaggaatttataatcagagcatggatgaggctgttcaaacagcagttgctcagggaaccattgtagtagcagcgactggcaatgatggtgcatcgtcgatcagttatcctgctgcctacagcagcgtcattgcggtgggatctgtggactccaatcgtgttcgatcctcgttttctaactatggatctgggcttgaactgatggcaccgggcagcaacatctacagtacgtatcctaatggcagatatcgcagtttgagtggtacaagcatggctactccgcacgttgcgggcgtagctgggctcattcgcgcagccaacccagacatagtggtcgcgcaagcccgtcagattctgcgggataccgcgcaagaagcaggatcgttcacacagtacggctatggaatcgtcgatgctcatgccgccgttgttgctgcatccggtggtagcggcggc

SEQ ID NO: 1214 - protein, 413 aa, synthetic construct
  REGION 1..413: note = Variant of serine peptidase from Bacillus sinesaloumensis
MADQASQANGNQDVIEGELIVSVEPKNGKPDVSIQSAQSVTGQEDVLKSKGFTIVDTLHVEDSSVKPLVSKNFNKKVVEKMGLVYLVQYSPDQFKSSNIAKKELRKELMDLGFKVRYISENYKMMAIEGTATLQGVHPNQVWAYNMIKAPEAWAITSGSLSVKVAVLDTGIDHNHPSLANFVNTNLGRSFVGGNTMDVQGHGTHVAGTIASYGSVSGVMQSATLIPVKVLDNSGSGSLYGITQGILYAADIDADVINMSLGGGIYNQSMDEAVQTAVAQGTIVVAATGNDGASSISYPAAYSSVIAVGSVDSNRVRSSFSNYGSGLELMAPGSNIYSTYPNGRYRSLSGTSMATPHVAGVAGLIRAANPDIVVAQARQILRDTAQEAGSFTQYGYGIVDAHAAVVAASGGSGG

SEQ ID NO: 1215 - DNA, 1239 bp, synthetic construct
  misc_feature 1..1239: note = Variant of serine peptidase from Bacillus sinesaloumensis
  source 1..1239: mol_type = other DNA
atggcagatcaagctagtcaagctaatggaaaccaggacgtcattgaaggcgagctgatcgtttcagtggaaccgaagaacggtaaacctgatgtgagcattcaaagtgcacaatccgtaacagggcaggaagacgtccttaaatcgaaaggctttacgatcgttgataccttgcatgtagaggatagcagcgtcaagccactcgtctcgaagaatttcaataagaaagtggtggagaagatgggactggtgtatcttgttcaatactctccggaccagtttaaaagttccaacattgcgaagaaagaactcagaaaagaattgatggatctgggctttaaagtccgctatataagcgaaaattacaagatgatggcgatcgaaggtacagccactcttcagggggtgcaccctaaccaagtttgggcgtataatatgattaaagctccggaagcgtgggctattacgtctggatccctgagcgttaaagtagcagtcctggatacagggatcgaccataatcacccatccttggccaacttcgtgaatactaatcttggccgctcgtttgttggaggaaacaccatggatgttcaaggtcatggcacacatgttgctggcacgattgcatcttatgggagtgtaagcggagtgatgcagagtgcgacactgatcccggtcaaagtgctcgataattctggcagcgggtccctttacggtattacgcagggcatattgtatgccgccgacatcgatgcggacgtcattaacatgtctctgggtggaggaggctataatcagagcatggatgaggctgttcaaacagcagttgctcagggaaccattgtagtagcagcgactggcaatgatggtgcagcgtcgatcagttatcctgctgcctacagcagcgtcattgcggtgggatctgtggactccaatcgtgttcgatcctcgttttctaactatggatctgggcttgaactgatggcaccgggcagcaacatctacagtacgtatcctaatggcagatatcgcagtttgagtggtacaagcatggctactccgcacgttgcgggcgtagctgggctcattcgcgcagccaacccagacatagtggtcgcgcaagcccgtcagattctgcgggataccgcgcaagaagcaggatcgttcacacagtacggctatggaatcgtcgatgctcatgccgccgttgttgctgcatccggtggtagcggcggc

SEQ ID NO: 1216 - protein, 413 aa, synthetic construct
  REGION 1..413: note = Variant of serine peptidase from Bacillus sinesaloumensis
MADQASQANGNQDVIEGELIVSVEPKNGKPDVSIQSAQSVTGQEDVLKSKGFTIVDTLHVEDSSVKPLVSKNFNKKVVEKMGLVYLVQYSPDQFKSSNIAKKELRKELMDLGFKVRYISENYKMMAIEGTATLQGVHPNQVWAYNMIKAPEAWAITSGSLSVKVAVLDTGIDHNHPSLANFVNTNLGRSFVGGNTMDVQGHGTHVAGTIASYGSVSGVMQSATLIPVKVLDNSGSGSLYGITQGILYAADIDADVINMSLGGGGYNQSMDEAVQTAVAQGTIVVAATGNDGAASISYPAAYSSVIAVGSVDSNRVRSSFSNYGSGLELMAPGSNIYSTYPNGRYRSLSGTSMATPHVAGVAGLIRAANPDIVVAQARQILRDTAQEAGSFTQYGYGIVDAHAAVVAASGGSGG

SEQ ID NO: 1217 - DNA, 1239 bp, synthetic construct
  misc_feature 1..1239: note = Variant of serine peptidase from Bacillus sinesaloumensis
  source 1..1239: mol_type = other DNA
atggcagatcaagctagtcaagctaatggaaaccaggacgtcattgaaggcgagctgatcgtttcagtggaaccgaagaacggtaaacctgatgtgagcattcaaagtgcacaatccgtaacagggcaggaagacgtccttaaatcgaaaggctttacgatcgttgataccttgcatgtagaggatagcagcgtcaagccactcgtctcgaagaatttcaataagaaagtggtggagaagatgggactggtgtatcttgttcaatactctccggaccagtttaaaagttccaacattgcgaagaaagaactcagaaaagaattgatggatctgggctttaaagtccgctatataagcgaaaattacaagatgatggcgatcgaaggtacagccactcttcagggggtgcaccctaaccaagtttgggcgtataatatgattaaagctccggaagcgtgggctattacgtctggatccctgagcgttaaagtagcagtcctggatacagggatcgaccataatcacccatccttggccaacttcgtgaatactaatcttggccgctcgtttgttggaggaaacaccatggatgttcaaggtcatggcacacatgttgctggcacgattgcatcttatgggagtgtaagcggagtgatgcagagtgcgacactgatcccggtcaaagtgctcgataatctgggcagcgggtccctttacggtattacgcagggcatattgtatgccgccgacatcgatgcggacgtcattaacatgtctctgggtggaggaggctataatcagagcatggatgaggctgttcaaacagcagttgctcagggaaccattgtagtagcagcgactggcaatgatggtgcatcgtcgatcagttatcctgctgcctacagcagcgtcattgcggtgggatctgtggactccaatcgtgttcgatcctcgttttctaactatggatctgggcttgaactgatggcaccgggcagcaacatctacagtacgtatcctaatggcagatatcgcagtttgagtggtacaagcatggctactccgcacgttgcgggcgtagctgggctcattcgcgcagccaacccagacatagtggtcgcgcaagcccgtcagattctgcgggataccgcgcaagaagcaggatcgttcacacagtacggctatggaatcgtcgatgctcatgccgccgttgttgctgcatccggtggtagcggcggc

SEQ ID NO: 1218 - protein, 413 aa, synthetic construct
  REGION 1..413: note = Variant of serine peptidase from Bacillus sinesaloumensis
MADQASQANGNQDVIEGELIVSVEPKNGKPDVSIQSAQSVTGQEDVLKSKGFTIVDTLHVEDSSVKPLVSKNFNKKVVEKMGLVYLVQYSPDQFKSSNIAKKELRKELMDLGFKVRYISENYKMMAIEGTATLQGVHPNQVWAYNMIKAPEAWAITSGSLSVKVAVLDTGIDHNHPSLANFVNTNLGRSFVGGNTMDVQGHGTHVAGTIASYGSVSGVMQSATLIPVKVLDNLGSGSLYGITQGILYAADIDADVINMSLGGGGYNQSMDEAVQTAVAQGTIVVAATGNDGASSISYPAAYSSVIAVGSVDSNRVRSSFSNYGSGLELMAPGSNIYSTYPNGRYRSLSGTSMATPHVAGVAGLIRAANPDIVVAQARQILRDTAQEAGSFTQYGYGIVDAHAAVVAASGGSGG

SEQ ID NO: 1219 - DNA, 1239 bp, synthetic construct
  misc_feature 1..1239: note = Variant of serine peptidase from Bacillus sinesaloumensis
  source 1..1239: mol_type = other DNA
atggcagatcaagctagtcaagctaatggaaaccaggacgtcattgaaggcgagctgatcgtttcagtggaaccgaagaacggtaaacctgatgtgagcattcaaagtgcacaatccgtaacagggcaggaagacgtccttaaatcgaaaggctttacgatcgttgataccttgcatgtagaggatagcagcgtcaagccactcgtctcgaagaatttcaataagaaagtggtggagaagatgggactggtgtatcttgttcaatactctccggaccagtttaaaagttccaacattgcgaagaaagaactcagaaaagaattgatggatctgggctttaaagtccgctatataagcgaaaattacaagatgatggcgatcgaaggtacagccactcttcagggggtgcaccctaaccaagtttgggcgtataatatgattaaagctccggaagcgtgggctattacgtctggatccctgagcgttaaagtagcagtcctggatacagggatcgaccataatcacccatccttggccaacttcgtgaatactaatcttggccgctcgtttgttggaggaaacaccatggatgttcaaggtcatggcacacatgttgctggcacgattgcatcttatgggagtgtaagcggagtgatgcagagtgcgacactgatcccggtcaaagtgctcgataattctggcagcgggtccctttacggtattacgcagggcatattgtatgccgccgacatcgatgcggacgtcattaacatgtctctgggtggaggaggctataatcagagcatggatgaggctgttcaaacagcagtttatcagggaaccattgtagtagcagcgactggcaatgatggtgcatcgtcgatcagttatcctgctgcctacagcagcgtcattgcggtgggatctgtggactccaatcgtgttcgatcctcgttttctaactatggatctgggcttgaactgatggcaccgggcagcaacatctacagtacgtatcctaatggcagatatcgcagtttgagtggtacaagcatggctactccgcacgttgcgggcgtagctgggctcattcgcgcagccaacccagacatagtggtcgcgcaagcccgtcagattctgcgggataccgcgcaagaagcaggatcgttcacacagtacggctatggaatcgtcgatgctcatgccgccgttgttgctgcatccggtggtagcggcggc

SEQ ID NO: 1220 - protein, 413 aa, synthetic construct
  REGION 1..413: note = Variant of serine peptidase from Bacillus sinesaloumensis
MADQASQANGNQDVIEGELIVSVEPKNGKPDVSIQSAQSVTGQEDVLKSKGFTIVDTLHVEDSSVKPLVSKNFNKKVVEKMGLVYLVQYSPDQFKSSNIAKKELRKELMDLGFKVRYISENYKMMAIEGTATLQGVHPNQVWAYNMIKAPEAWAITSGSLSVKVAVLDTGIDHNHPSLANFVNTNLGRSFVGGNTMDVQGHGTHVAGTIASYGSVSGVMQSATLIPVKVLDNSGSGSLYGITQGILYAADIDADVINMSLGGGGYNQSMDEAVQTAVYQGTIVVAATGNDGASSISYPAAYSSVIAVGSVDSNRVRSSFSNYGSGLELMAPGSNIYSTYPNGRYRSLSGTSMATPHVAGVAGLIRAANPDIVVAQARQILRDTAQEAGSFTQYGYGIVDAHAAVVAASGGSGG

SEQ ID NO: 1221 - DNA, 1239 bp, synthetic construct
  misc_feature 1..1239: note = Variant of serine peptidase from Bacillus sinesaloumensis
  source 1..1239: mol_type = other DNA
atggcagatcaagctagtcaagctaatggaaaccaggacgtcattgaaggcgagctgatcgtttcagtggaaccgaagaacggtaaacctgatgtgagcattcaaagtgcacaatccgtaacagggcaggaagacgtccttaaatcgaaaggctttacgatcgttgataccttgcatgtagaggatagcagcgtcaagccactcgtctcgaagaatttcaataagaaagtggtggagaagatgggactggtgtatcttgttcaatactctccggaccagtttaaaagttccaacattgcgaagaaagaactcagaaaagaattgatggatctgggctttaaagtccgctatataagcgaaaattacaagatgatggcgatcgaaggtacagccactcttcagggggtgcaccctaaccaagtttgggcgtataatatgattaaagctccggaagcgtgggctattacgtctggatccctgagcgttaaagtagcagtcctggatacagggatcgactttaatcacccatccttggccaacttcgtgaatactaatcttggccgctcgtttgttggaggaaacaccatggatgttcaaggtcatggcacacatgttgctggcacgattgcatcttatgggagtgtaagcggagtgatgcagagtgcgacactgatcccggtcaaagtgctcgataattctggcagcgggtccctttacggtattacgcagggcatattgtatgccgccgacatcgatgcggacgtcattaacatgtctctgggtggaggaggctataatcagagcatggatgaggctgttcaaacagcagttgctcagggaaccattgtagtagcagcgactggcaatgatggtgcatcgtcgatcagttatcctgctgcctacagcagcgtcattgcggtgggatctgtggactccaatcgtgttcgatcctcgttttctaactatggatctgggcttgaactgatggcaccgggcagcaacatctacagtacgtatcctaatggcagatatcgcagtttgagtggtacaagcatggctactccgcacgttgcgggcgtagctgggctcattcgcgcagccaacccagacatagtggtcgcgcaagcccgtcagattctgcgggataccgcgcaagaagcaggatcgttcacacagtacggctatggaatcgtcgatgctcatgccgccgttgttgctgcatccggtggtagcggcggc

SEQ ID NO: 1222 - protein, 413 aa, synthetic construct
  REGION 1..413: note = Variant of serine peptidase from Bacillus sinesaloumensis
MADQASQANGNQDVIEGELIVSVEPKNGKPDVSIQSAQSVTGQEDVLKSKGFTIVDTLHVEDSSVKPLVSKNFNKKVVEKMGLVYLVQYSPDQFKSSNIAKKELRKELMDLGFKVRYISENYKMMAIEGTATLQGVHPNQVWAYNMIKAPEAWAITSGSLSVKVAVLDTGIDFNHPSLANFVNTNLGRSFVGGNTMDVQGHGTHVAGTIASYGSVSGVMQSATLIPVKVLDNSGSGSLYGITQGILYAADIDADVINMSLGGGGYNQSMDEAVQTAVAQGTIVVAATGNDGASSISYPAAYSSVIAVGSVDSNRVRSSFSNYGSGLELMAPGSNIYSTYPNGRYRSLSGTSMATPHVAGVAGLIRAANPDIVVAQARQILRDTAQEAGSFTQYGYGIVDAHAAVVAASGGSGG

SEQ ID NO: 1223 - DNA, 1239 bp, synthetic construct
  misc_feature 1..1239: note = Variant of serine peptidase from Bacillus sinesaloumensis
  source 1..1239: mol_type = other DNA
atggcagatcaagctagtcaagctaatggaaaccaggacgtcattgaaggcgagctgatcgtttcagtggaaccgaagaacggtaaacctgatgtgagcattcaaagtgcacaatccgtaacagggcaggaagacgtccttaaatcgaaaggctttacgatcgttgataccttgcatgtagaggatagcagcgtcaagccactcgtctcgaagaatttcaataagaaagtggtggagaagatgggactggtgtatcttgttcaatactctccggaccagtttaaaagttccaacattgcgaagaaagaactcagaaaagaattgatggatctgggctttaaagtccgctatataagcgaaaattacaagatgatggcgatcgaaggtacagccactcttcagggggtgcaccctaaccaagtttgggcgtataatatgattaaagctccggaagcgtgggctattacgtctggatccctgagcgttaaagtagcagtcctggatacagggatcgaccataatcacccatccttggccaacttcgtgaatactaatcttggccgctcgtttgttggaggaaacaccatggatgttcaaggtcatggcacacatgttgctggcacgattgcatcttatgggagtgtaagcggagtgatgcagagtgcgacactgatcccggtcaaagtgctcgataattctggcagcgggtccctttacggtattacgcagggcatattgtatgccgccgacatcgatgcggacgtcattaacatgtctctgggtggaggaggctataatcagagcatggatgaggctgttttgacagcagttgctcagggaaccattgtagtagcagcgactggcaatgatggtgcatcgtcgatcagttatcctgctgcctacagcagcgtcattgcggtgggatctgtggactccaatcgtgttcgatcctcgttttctaactatggatctgggcttgaactgatggcaccgggcagcaacatctacagtacgtatcctaatggcagatatcgcagtttgagtggtacaagcatggctactccgcacgttgcgggcgtagctgggctcattcgcgcagccaacccagacatagtggtcgcgcaagcccgtcagattctgcgggataccgcgcaagaagcaggatcgttcacacagtacggctatggaatcgtcgatgctcatgccgccgttgttgctgcatccggtggtagcggcggc

SEQ ID NO: 1224 - protein, 413 aa, synthetic construct
  REGION 1..413: note = Variant of serine peptidase from Bacillus sinesaloumensis
MADQASQANGNQDVIEGELIVSVEPKNGKPDVSIQSAQSVTGQEDVLKSKGFTIVDTLHVEDSSVKPLVSKNFNKKVVEKMGLVYLVQYSPDQFKSSNIAKKELRKELMDLGFKVRYISENYKMMAIEGTATLQGVHPNQVWAYNMIKAPEAWAITSGSLSVKVAVLDTGIDHNHPSLANFVNTNLGRSFVGGNTMDVQGHGTHVAGTIASYGSVSGVMQSATLIPVKVLDNSGSGSLYGITQGILYAADIDADVINMSLGGGGYNQSMDEAVLTAVAQGTIVVAATGNDGASSISYPAAYSSVIAVGSVDSNRVRSSFSNYGSGLELMAPGSNIYSTYPNGRYRSLSGTSMATPHVAGVAGLIRAANPDIVVAQARQILRDTAQEAGSFTQYGYGIVDAHAAVVAASGGSGG

SEQ ID NO: 1225 - DNA, 1239 bp, synthetic construct
  misc_feature 1..1239: note = Variant of serine peptidase from Bacillus sinesaloumensis
  source 1..1239: mol_type = other DNA
atggcagatcaagctagtcaagctaatggaaaccaggacgtcattgaaggcgagctgatcgtttcagtggaaccgaagaacggtaaacctgatgtgagcattcaaagtgcacaatccgtaacagggcaggaagacgtccttaaatcgaaaggctttacgatcgttgataccttgcatgtagaggatagcagcgtcaagccactcgtctcgaagaatttcaataagaaagtggtggagaagatgggactggtgtatcttgttcaatactctccggaccagtttaaaagttccaacattgcgaagaaagaactcagaaaagaattgatggatctgggctttaaagtccgctatataagcgaaaattacaagatgatggcgatcgaaggtacagccactcttcagggggtgcaccctaaccaagtttgggcgtataatatgattaaagctccggaagcgtgggctattacgtctggatccctgagcgttaaagtagcagtcctggatacagggatcgaccataatcacccatccttggccaacttcgtgaatactaatcttggccgctcgtttgttggaggaaacaccatggatgttcaaggtcatggcacacatgttgctggcacgattgcatcttatgggagtgtaagcggagtgatgcagagtgcgacactgatcccggtcaaagtgctcgataattctggcagcgggtccctttacggtattacgcagggcatattgtatgccgccgacatcgatgcggacgtcattaacatgtctctgggtggaggaggctataatcagagcatggatgaggctgttcaaacagcagttgctcagggaaccattgtagtagcagcgactggcaatgatggtgcatcgtcgatcagttatcctgctgcctacagcagcgtcattgcggtgggatctgtggactgtaatcgtgttcgatcctcgttttctaactatggatctgggcttgaactgatggcaccgggcagcaacatctacagtacgtatcctaatggcagatatcgcagtttgagtggtacaagcatggctactccgcacgttgcgggcgtagctgggctcattcgcgcagccaacccagacatagtggtcgcgcaagcccgtcagattctgcgggataccgcgcaagaagcaggatcgttcacacagtacggctatggaatcgtcgatgctcatgccgccgttgttgctgcatccggtggtagcggcggc

SEQ ID NO: 1226 - protein, 413 aa, synthetic construct
  REGION 1..413: note = Variant of serine peptidase from Bacillus sinesaloumensis
MADQASQANGNQDVIEGELIVSVEPKNGKPDVSIQSAQSVTGQEDVLKSKGFTIVDTLHVEDSSVKPLVSKNFNKKVVEKMGLVYLVQYSPDQFKSSNIAKKELRKELMDLGFKVRYISENYKMMAIEGTATLQGVHPNQVWAYNMIKAPEAWAITSGSLSVKVAVLDTGIDHNHPSLANFVNTNLGRSFVGGNTMDVQGHGTHVAGTIASYGSVSGVMQSATLIPVKVLDNSGSGSLYGITQGILYAADIDADVINMSLGGGGYNQSMDEAVQTAVAQGTIVVAATGNDGASSISYPAAYSSVIAVGSVDCNRVRSSFSNYGSGLELMAPGSNIYSTYPNGRYRSLSGTSMATPHVAGVAGLIRAANPDIVVAQARQILRDTAQEAGSFTQYGYGIVDAHAAVVAASGGSGG

SEQ ID NO: 1227 - DNA, 1239 bp, synthetic construct
  misc_feature 1..1239: note = Variant of serine peptidase from Bacillus sinesaloumensis
  source 1..1239: mol_type = other DNA
atggcagatcaagctagtcaagctaatggaaaccaggacgtcattgaaggcgagctgatcgtttcagtggaaccgaagaacggtaaacctgatgtgagcattcaaagtgcacaatccgtaacagggcaggaagacgtccttaaatcgaaaggctttacgatcgttgataccttgcatgtagaggatagcagcgtcaagccactcgtctcgaagaatttcaataagaaagtggtggagaagatgggactggtgtatcttgttcaatactctccggaccagtttaaaagttccaacattgcgaagaaagaactcagaaaagaattgatggatctgggctttaaagtccgctatataagcgaaaattacaagatgatggcgatcgaaggtacagccactcttcagggggtgcaccctaaccaagtttgggcgtataatatgattaaagctccggaagcgtgggctattacgtctggatccctgagcgttaaagtagcagtcctggatacagggatcgaccataatcacccatccttggccaacttcgtgaatactaatcttggccgctcgtttgttggaggaaacaccatggatgttcaaggtcatggcacacatgttgctggcacgattgcatcttatgggagtgtaagcggagtgatgcagagtgcgacactgatcccggtcaaagtgctcgataattctggcagcgggtccctttacggtattacgcagggcatattgtatgccgccgacatcgatgcggacgtcattaacatgtctctgggtggaggaggctataatcagagcatggatgaggctgttcaaacagcagttgctctgggaaccattgtagtagcagcgactggcaatgatggtgcatcgtcgatcagttatcctgctgcctacagcagcgtcattgcggtgggatctgtggactccaatcgtgttcgatcctcgttttctaactatggatctgggcttgaactgatggcaccgggcagcaacatctacagtacgtatcctaatggcagatatcgcagtttgagtggtacaagcatggctactccgcacgttgcgggcgtagctgggctcattcgcgcagccaacccagacatagtggtcgcgcaagcccgtcagattctgcgggataccgcgcaagaagcaggatcgttcacacagtacggctatggaatcgtcgatgctcatgccgccgttgttgctgcatccggtggtagcggcggc

SEQ ID NO: 1228 - protein, 413 aa, synthetic construct
  REGION 1..413: note = Variant of serine peptidase from Bacillus sinesaloumensis
MADQASQANGNQDVIEGELIVSVEPKNGKPDVSIQSAQSVTGQEDVLKSKGFTIVDTLHVEDSSVKPLVSKNFNKKVVEKMGLVYLVQYSPDQFKSSNIAKKELRKELMDLGFKVRYISENYKMMAIEGTATLQGVHPNQVWAYNMIKAPEAWAITSGSLSVKVAVLDTGIDHNHPSLANFVNTNLGRSFVGGNTMDVQGHGTHVAGTIASYGSVSGVMQSATLIPVKVLDNSGSGSLYGITQGILYAADIDADVINMSLGGGGYNQSMDEAVQTAVALGTIVVAATGNDGASSISYPAAYSSVIAVGSVDSNRVRSSFSNYGSGLELMAPGSNIYSTYPNGRYRSLSGTSMATPHVAGVAGLIRAANPDIVVAQARQILRDTAQEAGSFTQYGYGIVDAHAAVVAASGGSGG

SEQ ID NO: 1229 - DNA, 1239 bp, synthetic construct
  misc_feature 1..1239: note = Variant of serine peptidase from Bacillus sinesaloumensis
  source 1..1239: mol_type = other DNA
atggcagatcaagctagtcaagctaatggaaaccaggacgtcattgaaggcgagctgatcgtttcagtggaaccgaagaacggtaaacctgatgtgagcattcaaagtgcacaatccgtaacagggcaggaagacgtccttaaatcgaaaggctttacgatcgttgataccttgcatgtagaggatagcagcgtcaagccactcgtctcgaagaatttcaataagaaagtggtggagaagatgggactggtgtatcttgttcaatactctccggaccagtttaaaagttccaacattgcgaagaaagaactcagaaaagaattgatggatctgggctttaaagtccgctatataagcgaaaattacaagatgatggcgatcgaaggtacagccactcttcagggggtgcaccctaaccaagtttgggcgtataatatgattaaagctccggaagcgtgggctattacgtctggatccctgagcgttaaagtagcagtcctggatacagggatcgaccataatcacccatccttggccaacttcgtgaatactaatcttggccgctcgtttgttggaggaaacaccatggatgttcaaggtcatggcacacatgttgctggcacgattgcatcttatgggagtgtaagcggagtgatgcagagtgcgacactgatcccggtcaaagtgctcgataattctggcagcgggtccctttacggtattacgcagggcatattgtatgccgccgacatcgatgcggacgtcattaacatgtctctgggtggaggaggctataatcagagcatggatgaggctgttcaaacagcagttgctcagggaaccattgtagtagcagcgactggcaatgatggtgcatcgtcgatcagttatcctgctgcctacggtagcgtcattgcggtgggatctgtggactccaatcgtgttcgatcctcgttttctaactatggatctgggcttgaactgatggcaccgggcagcaacatctacagtacgtatcctaatggcagatatcgcagtttgagtggtacaagcatggctactccgcacgttgcgggcgtagctgggctcattcgcgcagccaacccagacatagtggtcgcgcaagcccgtcagattctgcgggataccgcgcaagaagcaggatcgttcacacagtacggctatggaatcgtcgatgctcatgccgccgttgttgctgcatccggtggtagcggcggc

SEQ ID NO: 1230 - protein, 413 aa, synthetic construct
  REGION 1..413: note = Variant of serine peptidase from Bacillus sinesaloumensis
MADQASQANGNQDVIEGELIVSVEPKNGKPDVSIQSAQSVTGQEDVLKSKGFTIVDTLHVEDSSVKPLVSKNFNKKVVEKMGLVYLVQYSPDQFKSSNIAKKELRKELMDLGFKVRYISENYKMMAIEGTATLQGVHPNQVWAYNMIKAPEAWAITSGSLSVKVAVLDTGIDHNHPSLANFVNTNLGRSFVGGNTMDVQGHGTHVAGTIASYGSVSGVMQSATLIPVKVLDNSGSGSLYGITQGILYAADIDADVINMSLGGGGYNQSMDEAVQTAVAQGTIVVAATGNDGASSISYPAAYGSVIAVGSVDSNRVRSSFSNYGSGLELMAPGSNIYSTYPNGRYRSLSGTSMATPHVAGVAGLIRAANPDIVVAQARQILRDTAQEAGSFTQYGYGIVDAHAAVVAASGGSGG

SEQ ID NO: 1231 - DNA, 1239 bp, synthetic construct
  misc_feature 1..1239: note = Variant of serine peptidase from Bacillus sinesaloumensis
  source 1..1239: mol_type = other DNA
atggcagatcaagctagtcaagctaatggaaaccaggacgtcattgaaggcgagctgatcgtttcagtggaaccgaagaacggtaaacctgatgtgagcattcaaagtgcacaatccgtaacagggcaggaagacgtccttaaatcgaaaggctttacgatcgttgataccttgcatgtagaggatagcagcgtcaagccactcgtctcgaagaatttcaataagaaagtggtggagaagatgggactggtgtatcttgttcaatactctccggaccagtttaaaagttccaacattgcgaagaaagaactcagaaaagaattgatggatctgggctttaaagtccgctatataagcgaaaattacaagatgatggcgatcgaaggtacagccactcttcagggggtgcaccctaaccaagtttgggcgtataatatgattaaagctccggaagcgtgggctattacgtctggatccctgagcgttaaagtagcagtcctggatacagggatcgaccataatcacccatccttggccaacttcgtgaatactaatcttggccgctcgtttgttggaggaaacaccatggatgttcaaggtcatggcacacatgttgctggcacgattgcatcttatgggagtgtaagcggagtgatgcagagtgcgacactgatcccggtcaaagtgctcgataattctggcagcgggtcccagtacggtattacgcagggcatattgtatgccgccgacatcgatgcggacgtcattaacatgtctctgggtggaggaggctataatcagagcatggatgaggctgttcaaacagcagttgctcagggaaccattgtagtagcagcgactggcaatgatggtgcatcgtcgatcagttatcctgctgcctacagcagcgtcattgcggtgggatctgtggactccaatcgtgttcgatcctcgttttctaactatggatctgggcttgaactgatggcaccgggcagcaacatctacagtacgtatcctaatggcagatatcgcagtttgagtggtacaagcatggctactccgcacgttgcgggcgtagctgggctcattcgcgcagccaacccagacatagtggtcgcgcaagcccgtcagattctgcgggataccgcgcaagaagcaggatcgttcacacagtacggctatggaatcgtcgatgctcatgccgccgttgttgctgcatccggtggtagcggcggc

SEQ ID NO: 1232 - protein, 413 aa, synthetic construct
  REGION 1..413: note = Variant of serine peptidase from Bacillus sinesaloumensis
MADQASQANGNQDVIEGELIVSVEPKNGKPDVSIQSAQSVTGQEDVLKSKGFTIVDTLHVEDSSVKPLVSKNFNKKVVEKMGLVYLVQYSPDQFKSSNIAKKELRKELMDLGFKVRYISENYKMMAIEGTATLQGVHPNQVWAYNMIKAPEAWAITSGSLSVKVAVLDTGIDHNHPSLANFVNTNLGRSFVGGNTMDVQGHGTHVAGTIASYGSVSGVMQSATLIPVKVLDNSGSGSQYGITQGILYAADIDADVINMSLGGGGYNQSMDEAVQTAVAQGTIVVAATGNDGASSISYPAAYSSVIAVGSVDSNRVRSSFSNYGSGLELMAPGSNIYSTYPNGRYRSLSGTSMATPHVAGVAGLIRAANPDIVVAQARQILRDTAQEAGSFTQYGYGIVDAHAAVVAASGGSGG

SEQ ID NO: 1233 - DNA, 1239 bp, synthetic construct
  misc_feature 1..1239: note = Variant of serine peptidase from Bacillus sinesaloumensis
  source 1..1239: mol_type = other DNA
atggcagatcaagctagtcaagctaatggaaaccaggacgtcattgaaggcgagctgatcgtttcagtggaaccgaagaacggtaaacctgatgtgagcattcaaagtgcacaatccgtaacagggcaggaagacgtccttaaatcgaaaggctttacgatcgttgataccttgcatgtagaggatagcagcgtcaagccactcgtctcgaagaatttcaataagaaagtggtggagaagatgggactggtgtatcttgttcaatactctccggaccagtttaaaagttccaacattgcgaagaaagaactcagaaaagaattgatggatctgggctttaaagtccgctatataagcgaaaattacaagatgatggcgatcgaaggtacagccactcttcagggggtgcaccctaaccaagtttgggcgtataatatgattaaagctccggaagcgtgggctattacgtctggatccctgagcgttaaagtagcagtcctggatacagggatcgaccataatcacccatccttggccaacttcgtgaatactaatcttggccgctcgtttgttggaggaaacaccatggatgttcaaggtcatggcacacatgttgctggcacgattgcatcttatgggagtgtaagcggagtgatgcagagtgcgacactgatcccggtcaaagtgctcgataattctggcagcgggtccctttacggtattacgcagggcatattgtatgccgccgacatcgatgcggacgtcattaacatgtctctgggtggaggaggctataatcagagcatggatgaggctgttcaaacagcagttgctcagggaaccattgtagtagcagcgactggcaatgatggtgcatcgtggatcagttatcctgctgcctacagcagcgtcattgcggtgggatctgtggactccaatcgtgttcgatcctcgttttctaactatggatctgggcttgaactgatggcaccgggcagcaacatctacagtacgtatcctaatggcagatatcgcagtttgagtggtacaagcatggctactccgcacgttgcgggcgtagctgggctcattcgcgcagccaacccagacatagtggtcgcgcaagcccgtcagattctgcgggataccgcgcaagaagcaggatcgttcacacagtacggctatggaatcgtcgatgctcatgccgccgttgttgctgcatccggtggtagcggcggc

SEQ ID NO: 1234 - protein, 413 aa, synthetic construct
  REGION 1..413: note = Variant of serine peptidase from Bacillus sinesaloumensis
MADQASQANGNQDVIEGELIVSVEPKNGKPDVSIQSAQSVTGQEDVLKSKGFTIVDTLHVEDSSVKPLVSKNFNKKVVEKMGLVYLVQYSPDQFKSSNIAKKELRKELMDLGFKVRYISENYKMMAIEGTATLQGVHPNQVWAYNMIKAPEAWAITSGSLSVKVAVLDTGIDHNHPSLANFVNTNLGRSFVGGNTMDVQGHGTHVAGTIASYGSVSGVMQSATLIPVKVLDNSGSGSLYGITQGILYAADIDADVINMSLGGGGYNQSMDEAVQTAVAQGTIVVAATGNDGASWISYPAAYSSVIAVGSVDSNRVRSSFSNYGSGLELMAPGSNIYSTYPNGRYRSLSGTSMATPHVAGVAGLIRAANPDIVVAQARQILRDTAQEAGSFTQYGYGIVDAHAAVVAASGGSGG

SEQ ID NO: 1235 - DNA, 1239 bp, synthetic construct
  misc_feature 1..1239: note = Variant of serine peptidase from Bacillus sinesaloumensis
  source 1..1239: mol_type = other DNA
atggcagatcaagctagtcaagctaatggaaaccaggacgtcattgaaggcgagctgatcgtttcagtggaaccgaagaacggtaaacctgatgtgagcattcaaagtgcacaatccgtaacagggcaggaagacgtccttaaatcgaaaggctttacgatcgttgataccttgcatgtagaggatagcagcgtcaagccactcgtctcgaagaatttcaataagaaagtggtggagaagatgggactggtgtatcttgttcaatactctccggaccagtttaaaagttccaacattgcgaagaaagaactcagaaaagaattgatggatctgggctttaaagtccgctatataagcgaaaattacaagatgatggcgatcgaaggtacagccactcttcaggctgtgcaccctaaccaagtttgggcgtataatatgattaaagctccggaagcgtgggctattacgtctggatccctgagcgttaaagtagcagtcctggatacagggatcgaccataatcacccatccttggccaacttcgtgaatactaatcttggccgctcgtttgttggaggaaacaccatggatgttcaaggtcatggcacacatgttgctggcacgattgcatcttatgggagtgtaagcggagtgatgcagagtgcgacactgatcccggtcaaagtgctcgataattctggcagcgggtccctttacggtattacgcagggcatattgtatgccgccgacatcgatgcggacgtcattaacatgtctctgggtggaggaggctataatcagagcatggatgaggctgttcaaacagcagttgctcagggaaccattgtagtagcagcgactggcaatgatggtgcatcgtcgatcagttatcctgctgcctacagcagcgtcattgcggtgggatctgtggactccaatcgtgttcgatcctcgttttctaactatggatctgggcttgaactgatggcaccgggcagcaacatctacagtacgtatcctaatggcagatatcgcagtttgagtggtacaagcatggctactccgcacgttgcgggcgtagctgggctcattcgcgcagccaacccagacatagtggtcgcgcaagcccgtcagattctgcgggataccgcgcaagaagcaggatcgttcacacagtacggctatggaatcgtcgatgctcatgccgccgttgttgctgcatccggtggtagcggcggc

SEQ ID NO: 1236 - protein, 413 aa, synthetic construct
  REGION 1..413: note = Variant of serine peptidase from Bacillus sinesaloumensis
MADQASQANGNQDVIEGELIVSVEPKNGKPDVSIQSAQSVTGQEDVLKSKGFTIVDTLHVEDSSVKPLVSKNFNKKVVEKMGLVYLVQYSPDQFKSSNIAKKELRKELMDLGFKVRYISENYKMMAIEGTATLQAVHPNQVWAYNMIKAPEAWAITSGSLSVKVAVLDTGIDHNHPSLANFVNTNLGRSFVGGNTMDVQGHGTHVAGTIASYGSVSGVMQSATLIPVKVLDNSGSGSLYGITQGILYAADIDADVINMSLGGGGYNQSMDEAVQTAVAQGTIVVAATGNDGASSISYPAAYSSVIAVGSVDSNRVRSSFSNYGSGLELMAPGSNIYSTYPNGRYRSLSGTSMATPHVAGVAGLIRAANPDIVVAQARQILRDTAQEAGSFTQYGYGIVDAHAAVVAASGGSGG

SEQ ID NO: 1237 - DNA, 1239 bp, synthetic construct
  misc_feature 1..1239: note = Variant of serine peptidase from Bacillus sinesaloumensis
  source 1..1239: mol_type = other DNA
atggcagatcaagctagtcaagctaatggaaaccaggacgtcattgaaggcgagctgatcgtttcagtggaaccgaagaacggtaaacctgatgtgagcattcaaagtgcacaatccgtaacagggcaggaagacgtccttaaatcgaaaggctttacgatcgttgataccttgcatgtagaggatagcagcgtcaagccactcgtctcgaagaatttcaataagaaagtggtggagaagatgggactggtgtatcttgttcaatactctccggaccagtttaaaagttccaacattgcgaagaaagaactcagaaaagaattgatggatctgggctttaaagtccgctatataagcgaaaattacaagatgatggcgatcgaaggtacagccactcttcagggggtgcaccctaaccaagtttgggcgtataatatgattaaagctccggaagcgtgggctattacgtctggatccctgagcgttaaagtagcagtcctggatacagggatcgaccataatcacccatccttggccaacttcgtgaatactaatcttggccgctcgtttgttggaggaaacaccatggatgttcaaggtcatggcacacatgttgctggcacgattgcatcttatgggagtgtaagcggagtgatgcaggaggcgacactgatcccggtcaaagtgctcgataattctggcagcgggtccctttacggtattacgcagggcatattgtatgccgccgacatcgatgcggacgtcattaacatgtctctgggtggaggaggctataatcagagcatggatgaggctgttcaaacagcagttgctcagggaaccattgtagtagcagcgactggcaatgatggtgcatcgtcgatcagttatcctgctgcctacagcagcgtcattgcggtgggatctgtggactccaatcgtgttcgatcctcgttttctaactatggatctgggcttgaactgatggcaccgggcagcaacatctacagtacgtatcctaatggcagatatcgcagtttgagtggtacaagcatggctactccgcacgttgcgggcgtagctgggctcattcgcgcagccaacccagacatagtggtcgcgcaagcccgtcagattctgcgggataccgcgcaagaagcaggatcgttcacacagtacggctatggaatcgtcgatgctcatgccgccgttgttgctgcatccggtggtagcggcggc

SEQ ID NO: 1238 - protein, 413 aa, synthetic construct
  REGION 1..413: note = Variant of serine peptidase from Bacillus sinesaloumensis
MADQASQANGNQDVIEGELIVSVEPKNGKPDVSIQSAQSVTGQEDVLKSKGFTIVDTLHVEDSSVKPLVSKNFNKKVVEKMGLVYLVQYSPDQFKSSNIAKKELRKELMDLGFKVRYISENYKMMAIEGTATLQGVHPNQVWAYNMIKAPEAWAITSGSLSVKVAVLDTGIDHNHPSLANFVNTNLGRSFVGGNTMDVQGHGTHVAGTIASYGSVSGVMQEATLIPVKVLDNSGSGSLYGITQGILYAADIDADVINMSLGGGGYNQSMDEAVQTAVAQGTIVVAATGNDGASSISYPAAYSSVIAVGSVDSNRVRSSFSNYGSGLELMAPGSNIYSTYPNGRYRSLSGTSMATPHVAGVAGLIRAANPDIVVAQARQILRDTAQEAGSFTQYGYGIVDAHAAVVAASGGSGG

SEQ ID NO: 1239 - DNA, 1239 bp, synthetic construct
  misc_feature 1..1239: note = Variant of serine peptidase from Bacillus sinesaloumensis
  source 1..1239: mol_type = other DNA
atggcagatcaagctagtcaagctaatggaaaccaggacgtcattgaaggcgagctgatcgtttcagtggaaccgaagaacggtaaacctgatgtgagcattcaaagtgcacaatccgtaacagggcaggaagacgtccttaaatcgaaaggctttacgatcgttgataccttgcatgtagaggatagcagcgtcaagccactcgtctcgaagaatttcaataagaaagtggtggagaagatgggactggtgtatcttgttcaatactctccggaccagtttaaaagttccaacattgcgaagaaagaactcagaaaagaattgatggatctgggctttaaagtccgctatataagcgaaaattacaagatgatggcgatcgaaggtacagccactcttcagggggtgcaccctaaccaagtttgggcgtataatatgattaaagctccggaagcgtgggctattacgtctggatccctgagcgttaaagtagcagtcctggatacagggatcgaccataatcacccatccttggccaacttcgtgaatactaatcttggccgctcgtttgttggaggaaacaccatggatgttcaaggtcatggcacacatgttgctggcacgattgcatcttatgggagtgtaagcggagtgatgcagagtgcgacactgatcccggtcaaagtgctcgataattctggcagcgggtccctttacggtattacgcagggcatattgtatgccgccgacatcgatgcggacgtcattaacatgtctctgggtggaggaggctataatcagagcatggatgaggctgttcaaacagcagttgctcagggaaccattgtagtagcagcgactggcaatagtggtgcatcgtcgatcagttatcctgctgcctacagcagcgtcattgcggtgggatctgtggactccaatcgtgttcgatcctcgttttctaactatggatctgggcttgaactgatggcaccgggcagcaacatctacagtacgtatcctaatggcagatatcgcagtttgagtggtacaagcatggctactccgcacgttgcgggcgtagctgggctcattcgcgcagccaacccagacatagtggtcgcgcaagcccgtcagattctgcgggataccgcgcaagaagcaggatcgttcacacagtacggctatggaatcgtcgatgctcatgccgccgttgttgctgcatccggtggtagcggcggc

SEQ ID NO: 1240 - protein, 413 aa, synthetic construct
  REGION 1..413: note = Variant of serine peptidase from Bacillus sinesaloumensis
MADQASQANGNQDVIEGELIVSVEPKNGKPDVSIQSAQSVTGQEDVLKSKGFTIVDTLHVEDSSVKPLVSKNFNKKVVEKMGLVYLVQYSPDQFKSSNIAKKELRKELMDLGFKVRYISENYKMMAIEGTATLQGVHPNQVWAYNMIKAPEAWAITSGSLSVKVAVLDTGIDHNHPSLANFVNTNLGRSFVGGNTMDVQGHGTHVAGTIASYGSVSGVMQSATLIPVKVLDNSGSGSLYGITQGILYAADIDADVINMSLGGGGYNQSMDEAVQTAVAQGTIVVAATGNSGASSISYPAAYSSVIAVGSVDSNRVRSSFSNYGSGLELMAPGSNIYSTYPNGRYRSLSGTSMATPHVAGVAGLIRAANPDIVVAQARQILRDTAQEAGSFTQYGYGIVDAHAAVVAASGGSGG

SEQ ID NO: 1241 - DNA, 1239 bp, synthetic construct
  misc_feature 1..1239: note = Variant of serine peptidase from Bacillus sinesaloumensis
  source 1..1239: mol_type = other DNA
atggcagatcaagctagtcaagctaatggaaaccaggacgtcattgaaggcgagctgatcgtttcagtggaaccgaagaacggtaaacctgatgtgagcattcaaagtgcacaatccgtaacagggcaggaagacgtccttaaatcgaaaggctttacgatcgttgataccttgcatgtagaggatagcagcgtcaagccactcgtctcgaagaatttcaataagaaagtggtggagaagatgggactggtgtatcttgttcaatactctccggaccagtttaaaagttccaacattgcgaagaaagaactcagaaaagaattgatggatctgggctttaaagtccgctatataagcgaaaattacaagatgatggcgatcgaaggtacagccactcttcagggggtgcaccctaaccaagtttgggcgtataatatgattaaagctccggaagcgtgggctattacgtctggatccctgagcgttaaagtagcagtcctggatacagggatcgaccataatcacccatccttggccaacttcgtgaatactaatcttggccgctcgtttgttggaggaaacaccatggatgttcaaggtcatggcacacatgttgctggcacgattgcatcttatgggagtgtaagcggagtgatgcagagtgcgacactgatcccggtcaaagtgctcgataattctggcagcgggtccctttacggtattacgcagggcatattgtatgccgccgacatcgatgcggacgtcattaacatgtctctgggtggaggaggctataatcagagcatggatgaggctgttcaaacagcagttagtcagggaaccattgtagtagcagcgactggcaatgatggtgcatcgtcgatcagttatcctgctgcctacagcagcgtcattgcggtgggatctgtggactccaatcgtgttcgatcctcgttttctaactatggatctgggcttgaactgatggcaccgggcagcaacatctacagtacgtatcctaatggcagatatcgcagtttgagtggtacaagcatggctactccgcacgttgcgggcgtagctgggctcattcgcgcagccaacccagacatagtggtcgcgcaagcccgtcagattctgcgggataccgcgcaagaagcaggatcgttcacacagtacggctatggaatcgtcgatgctcatgccgccgttgttgctgcatccggtggtagcggcggc

SEQ ID NO: 1242 - protein, 413 aa, synthetic construct
  REGION 1..413: note = Variant of serine peptidase from Bacillus sinesaloumensis
MADQASQANGNQDVIEGELIVSVEPKNGKPDVSIQSAQSVTGQEDVLKSKGFTIVDTLHVEDSSVKPLVSKNFNKKVVEKMGLVYLVQYSPDQFKSSNIAKKELRKELMDLGFKVRYISENYKMMAIEGTATLQGVHPNQVWAYNMIKAPEAWAITSGSLSVKVAVLDTGIDHNHPSLANFVNTNLGRSFVGGNTMDVQGHGTHVAGTIASYGSVSGVMQSATLIPVKVLDNSGSGSLYGITQGILYAADIDADVINMSLGGGGYNQSMDEAVQTAVSQGTIVVAATGNDGASSISYPAAYSSVIAVGSVDSNRVRSSFSNYGSGLELMAPGSNIYSTYPNGRYRSLSGTSMATPHVAGVAGLIRAANPDIVVAQARQILRDTAQEAGSFTQYGYGIVDAHAAVVAASGGSGG

SEQ ID NO: 1243 - DNA, 1239 bp, synthetic construct
  misc_feature 1..1239: note = Variant of serine peptidase from Bacillus sinesaloumensis
  source 1..1239: mol_type = other DNA
atggcagatcaagctagtcaagctaatggaaaccaggacgtcattgaaggcgagctgatcgtttcagtggaaccgaagaacggtaaacctgatgtgagcattcaaagtgcacaatccgtaacagggcaggaagacgtccttaaatcgaaaggctttacgatcgttgataccttgcatgtagaggatagcagcgtcaagccactcgtctcgaagaatttcaataagaaagtggtggagaagatgggactggtgtatcttgttcaatactctccggaccagtttaaaagttccaacattgcgaagaaagaactcagaaaagaattgatggatctgggctttaaagtccgctatataagcgaaaattacaagatgatggcgatcgaaggtacagccactcttcagggggtgcaccctaaccaagtttgggcgtataatatgattaaagctccggaagcgtgggctattacgtctggatccctgagcgttaaagtagcagtcctggatacagggatcgaccataatcacccatccttggccaacttcgtgaatactaatcttggccgctcgtttgttggaggaaacaccatggatgttcaaggtcatggcacacatgttgctggcacgattgcatcttatgggagtgtaagcggagtgatgcagagtgcgacactgatcccggtcaaagtgctcgataattctggcagcgggtccctttacggtattacgcagggcatattgtatgccgccgacatcgatgcggacgtcattaacatgtctctgggtggacagggctataatcagagcatggatgaggctgttcaaacagcagttgctcagggaaccattgtagtagcagcgactggcaatgatggtgcatcgtcgatcagttatcctgctgcctacagcagcgtcattgcggtgggatctgtggactccaatcgtgttcgatcctcgttttctaactatggatctgggcttgaactgatggcaccgggcagcaacatctacagtacgtatcctaatggcagatatcgcagtttgagtggtacaagcatggctactccgcacgttgcgggcgtagctgggctcattcgcgcagccaacccagacatagtggtcgcgcaagcccgtcagattctgcgggataccgcgcaagaagcaggatcgttcacacagtacggctatggaatcgtcgatgctcatgccgccgttgttgctgcatccggtggtagcggcggc

SEQ ID NO: 1244 - protein, 413 aa, synthetic construct
  REGION 1..413: note = Variant of serine peptidase from Bacillus sinesaloumensis
MADQASQANGNQDVIEGELIVSVEPKNGKPDVSIQSAQSVTGQEDVLKSKGFTIVDTLHVEDSSVKPLVSKNFNKKVVEKMGLVYLVQYSPDQFKSSNIAKKELRKELMDLGFKVRYISENYKMMAIEGTATLQGVHPNQVWAYNMIKAPEAWAITSGSLSVKVAVLDTGIDHNHPSLANFVNTNLGRSFVGGNTMDVQGHGTHVAGTIASYGSVSGVMQSATLIPVKVLDNSGSGSLYGITQGILYAADIDADVINMSLGGQGYNQSMDEAVQTAVAQGTIVVAATGNDGASSISYPAAYSSVIAVGSVDSNRVRSSFSNYGSGLELMAPGSNIYSTYPNGRYRSLSGTSMATPHVAGVAGLIRAANPDIVVAQARQILRDTAQEAGSFTQYGYGIVDAHAAVVAASGGSGG

SEQ ID NO: 1245 - DNA, 1239 bp, synthetic construct
  misc_feature 1..1239: note = Variant of serine peptidase from Bacillus sinesaloumensis
  source 1..1239: mol_type = other DNA
atggcagatcaagctagtcaagctaatggaaaccaggacgtcattgaaggcgagctgatcgtttcagtggaaccgaagaacggtaaacctgatgtgagcattcaaagtgcacaatccgtaacagggcaggaagacgtccttaaatcgaaaggctttacgatcgttgataccttgcatgtagaggatagcagcgtcaagccactcgtctcgaagaatttcaataagaaagtggtggagaagatgggactggtgtatcttgttcaatactctccggaccagtttaaaagttccaacattgcgaagaaagaactcagaaaagaattgatggatctgggctttaaagtccgctatataagcgaaaattacaagatgatggcgatcgaaggtacagccactcttcagggggtgcaccctaaccaagtttgggcgtataatatgattaaagctccggaagcgtgggctattacgtctggatccctgagcgttaaagtagcagtcctggatacagggatcgaccataatcacccatccttggccaacttcgtgaatactaatcttggccgctcgtttgttggaggaaacaccatggatgttcaaggtcatggcacacatgttgctggcacgattgcatcttatgggagtgtaagcggagtgatgcagagtgcgacactgatcccggtcaaagtgctcgataattctggcagcgggtccctttacggtattacgcagggcatattgtatgccgccgacatcgatgcggacgtcattaacatgtctctgggtggacatggctataatcagagcatggatgaggctgttcaaacagcagttgctcagggaaccattgtagtagcagcgactggcaatgatggtgcatcgtcgatcagttatcctgctgcctacagcagcgtcattgcggtgggatctgtggactccaatcgtgttcgatcctcgttttctaactatggatctgggcttgaactgatggcaccgggcagcaacatctacagtacgtatcctaatggcagatatcgcagtttgagtggtacaagcatggctactccgcacgttgcgggcgtagctgggctcattcgcgcagccaacccagacatagtggtcgcgcaagcccgtcagattctgcgggataccgcgcaagaagcaggatcgttcacacagtacggctatggaatcgtcgatgctcatgccgccgttgttgctgcatccggtggtagcggcggc

SEQ ID NO: 1246 - protein, 413 aa, synthetic construct
  REGION 1..413: note = Variant of serine peptidase from Bacillus sinesaloumensis
MADQASQANGNQDVIEGELIVSVEPKNGKPDVSIQSAQSVTGQEDVLKSKGFTIVDTLHVEDSSVKPLVSKNFNKKVVEKMGLVYLVQYSPDQFKSSNIAKKELRKELMDLGFKVRYISENYKMMAIEGTATLQGVHPNQVWAYNMIKAPEAWAITSGSLSVKVAVLDTGIDHNHPSLANFVNTNLGRSFVGGNTMDVQGHGTHVAGTIASYGSVSGVMQSATLIPVKVLDNSGSGSLYGITQGILYAADIDADVINMSLGGHGYNQSMDEAVQTAVAQGTIVVAATGNDGASSISYPAAYSSVIAVGSVDSNRVRSSFSNYGSGLELMAPGSNIYSTYPNGRYRSLSGTSMATPHVAGVAGLIRAANPDIVVAQARQILRDTAQEAGSFTQYGYGIVDAHAAVVAASGGSGG

SEQ ID NO: 1247 - DNA, 1239 bp, synthetic construct
  misc_feature 1..1239: note = Variant of serine peptidase from Bacillus sinesaloumensis
  source 1..1239: mol_type = other DNA
atggcagatcaagctagtcaagctaatggaaaccaggacgtcattgaaggcgagctgatcgtttcagtggaaccgaagaacggtaaacctgatgtgagcattcaaagtgcacaatccgtaacagggcaggaagacgtccttaaatcgaaaggctttacgatcgttgataccttgcatgtagaggatagcagcgtcaagccactcgtctcgaagaatttcaataagaaagtggtggagaagatgggactggtgtatcttgttcaatactctccggaccagtttaaaagttccaacattgcgaagaaagaactcagaaaagaattgatggatctgggctttaaagtccgctatataagcgaaaattacaagatgatggcgatcgaaggtacagccactcttcagggggtgcaccctaaccaagtttgggcgtataatatgattaaagctccggaagcgtgggctattacgtctggatccctgagcgttaaagtagcagtcctggatacagggatcgaccataatcacccatccttggccaacttcgtgaatactaatcttggccgctcgtttgttggaggaaacaccatggatgttcaaggtcatggcacacatgttgctggcacgattgcatcttatgggagtgtaagcggagtgatgcagagtgcgacactgatcccggtcaaagtgctcgataattctggcagcgggtccctttacggtattacgcagggcatattgtatgccgccgacatcgatgcggacgtcattaacatgtctctgggtggaggaggctataatcagagcatggatgaggctgttcaaacagcagttcttcagggaaccattgtagtagcagcgactggcaatgatggtgcatcgtcgatcagttatcctgctgcctacagcagcgtcattgcggtgggatctgtggactccaatcgtgttcgatcctcgttttctaactatggatctgggcttgaactgatggcaccgggcagcaacatctacagtacgtatcctaatggcagatatcgcagtttgagtggtacaagcatggctactccgcacgttgcgggcgtagctgggctcattcgcgcagccaacccagacatagtggtcgcgcaagcccgtcagattctgcgggataccgcgcaagaagcaggatcgttcacacagtacggctatggaatcgtcgatgctcatgccgccgttgttgctgcatccggtggtagcggcggc

SEQ ID NO: 1248 - protein, 413 aa, synthetic construct
  REGION 1..413: note = Variant of serine peptidase from Bacillus sinesaloumensis
MADQASQANGNQDVIEGELIVSVEPKNGKPDVSIQSAQSVTGQEDVLKSKGFTIVDTLHVEDSSVKPLVSKNFNKKVVEKMGLVYLVQYSPDQFKSSNIAKKELRKELMDLGFKVRYISENYKMMAIEGTATLQGVHPNQVWAYNMIKAPEAWAITSGSLSVKVAVLDTGIDHNHPSLANFVNTNLGRSFVGGNTMDVQGHGTHVAGTIASYGSVSGVMQSATLIPVKVLDNSGSGSLYGITQGILYAADIDADVINMSLGGGGYNQSMDEAVQTAVLQGTIVVAATGNDGASSISYPAAYSSVIAVGSVDSNRVRSSFSNYGSGLELMAPGSNIYSTYPNGRYRSLSGTSMATPHVAGVAGLIRAANPDIVVAQARQILRDTAQEAGSFTQYGYGIVDAHAAVVAASGGSGG

SEQ ID NO: 1249 - DNA, 1239 bp, synthetic construct
  misc_feature 1..1239: note = Variant of serine peptidase from Bacillus sinesaloumensis
  source 1..1239: mol_type = other DNA
atggcagatcaagctagtcaagctaatggaaaccaggacgtcattgaaggcgagctgatcgtttcagtggaaccgaagaacggtaaacctgatgtgagcattcaaagtgcacaatccgtaacagggcaggaagacgtccttaaatcgaaaggctttacgatcgttgataccttgcatgtagaggatagcagcgtcaagccactcgtctcgaagaatttcaataagaaagtggtggagaagatgggactggtgtatcttgttcaatactctccggaccagtttaaaagttccaacattgcgaagaaagaactcagaaaagaattgatggatctgggctttaaagtccgctatataagcgaaaattacaagatgatggcgatcgaaggtacagccactcttcagggggtgcaccctaaccaagtttgggcgtataatatgattaaagctccggaagcgtgggctattacgtctggatccctgagcgttaaagtagcagtcctggatacagggatcgaccataatcacccatccttggccaacttcgtgaatactaatcttggccgctcgtttgttggaggaaacaccatggatgttcaaggtcatggcacacatgttgctggcacgattgcatcttatgggagtgtaagcggagtgatgcagagtgcgacactgatcccggtcaaagtgctcgataattctggcagcgggtccctttacggtattacgcagggcatattgtatgccgccgacatcgatgcggacgtcattaacatgtctctgggtggagagggctataatcagagcatggatgaggctgttcaaacagcagttgctcagggaaccattgtagtagcagcgactggcaatgatggtgcatcgtcgatcagttatcctgctgcctacagcagcgtcattgcggtgggatctgtggactccaatcgtgttcgatcctcgttttctaactatggatctgggcttgaactgatggcaccgggcagcaacatctacagtacgtatcctaatggcagatatcgcagtttgagtggtacaagcatggctactccgcacgttgcgggcgtagctgggctcattcgcgcagccaacccagacatagtggtcgcgcaagcccgtcagattctgcgggataccgcgcaagaagcaggatcgttcacacagtacggctatggaatcgtcgatgctcatgccgccgttgttgctgcatccggtggtagcggcggc

SEQ ID NO: 1250 - protein, 413 aa, synthetic construct
  REGION 1..413: note = Variant of serine peptidase from Bacillus sinesaloumensis
MADQASQANGNQDVIEGELIVSVEPKNGKPDVSIQSAQSVTGQEDVLKSKGFTIVDTLHVEDSSVKPLVSKNFNKKVVEKMGLVYLVQYSPDQFKSSNIAKKELRKELMDLGFKVRYISENYKMMAIEGTATLQGVHPNQVWAYNMIKAPEAWAITSGSLSVKVAVLDTGIDHNHPSLANFVNTNLGRSFVGGNTMDVQGHGTHVAGTIASYGSVSGVMQSATLIPVKVLDNSGSGSLYGITQGILYAADIDADVINMSLGGEGYNQSMDEAVQTAVAQGTIVVAATGNDGASSISYPAAYSSVIAVGSVDSNRVRSSFSNYGSGLELMAPGSNIYSTYPNGRYRSLSGTSMATPHVAGVAGLIRAANPDIVVAQARQILRDTAQEAGSFTQYGYGIVDAHAAVVAASGGSGG

SEQ ID NO: 1251 - DNA, 1239 bp, synthetic construct
  misc_feature 1..1239: note = Variant of serine peptidase from Bacillus sinesaloumensis
  source 1..1239: mol_type = other DNA
atggcagatcaagctagtcaagctaatggaaaccaggacgtcattgaaggcgagctgatcgtttcagtggaaccgaagaacggtaaacctgatgtgagcattcaaagtgcacaatccgtaacagggcaggaagacgtccttaaatcgaaaggctttacgatcgttgataccttgcatgtagaggatagcagcgtcaagccactcgtctcgaagaatttcaataagaaagtggtggagaagatgggactggtgtatcttgttcaatactctccggaccagtttaaaagttccaacattgcgaagaaagaactcagaaaagaattgatggatctgggctttaaagtccgctatataagcgaaaattacaagatgatggcgatcgaaggtacagccactcttcagggggtgcaccctaaccaagtttgggcgtataatatgattaaagctccggaagcgtggctgattacgtctggatccctgagcgttaaagtagcagtcctggatacagggatcgaccataatcacccatccttggccaacttcgtgaatactaatcttggccgctcgtttgttggaggaaacaccatggatgttcaaggtcatggcacacatgttgctggcacgattgcatcttatgggagtgtaagcggagtgatgcagagtgcgacactgatcccggtcaaagtgctcgataattctggcagcgggtccctttacggtattacgcagggcatattgtatgccgccgacatcgatgcggacgtcattaacatgtctctgggtggaggaggctataatcagagcatggatgaggctgttcaaacagcagttgctcagggaaccattgtagtagcagcgactggcaatgatggtgcatcgtcgatcagttatcctgctgcctacagcagcgtcattgcggtgggatctgtggactccaatcgtgttcgatcctcgttttctaactatggatctgggcttgaactgatggcaccgggcagcaacatctacagtacgtatcctaatggcagatatcgcagtttgagtggtacaagcatggctactccgcacgttgcgggcgtagctgggctcattcgcgcagccaacccagacatagtggtcgcgcaagcccgtcagattctgcgggataccgcgcaagaagcaggatcgttcacacagtacggctatggaatcgtcgatgctcatgccgccgttgttgctgcatccggtggtagcggcggc

SEQ ID NO: 1252 - protein, 413 aa, synthetic construct
  REGION 1..413: note = Variant of serine peptidase from Bacillus sinesaloumensis
MADQASQANGNQDVIEGELIVSVEPKNGKPDVSIQSAQSVTGQEDVLKSKGFTIVDTLHVEDSSVKPLVSKNFNKKVVEKMGLVYLVQYSPDQFKSSNIAKKELRKELMDLGFKVRYISENYKMMAIEGTATLQGVHPNQVWAYNMIKAPEAWLITSGSLSVKVAVLDTGIDHNHPSLANFVNTNLGRSFVGGNTMDVQGHGTHVAGTIASYGSVSGVMQSATLIPVKVLDNSGSGSLYGITQGILYAADIDADVINMSLGGGGYNQSMDEAVQTAVAQGTIVVAATGNDGASSISYPAAYSSVIAVGSVDSNRVRSSFSNYGSGLELMAPGSNIYSTYPNGRYRSLSGTSMATPHVAGVAGLIRAANPDIVVAQARQILRDTAQEAGSFTQYGYGIVDAHAAVVAASGGSGG

SEQ ID NO: 1253 - DNA, 1239 bp, synthetic construct
  misc_feature 1..1239: note = Variant of serine peptidase from Bacillus sinesaloumensis
  source 1..1239: mol_type = other DNA
atggcagatcaagctagtcaagctaatggaaaccaggacgtcattgaaggcgagctgatcgtttcagtggaaccgaagaacggtaaacctgatgtgagcattcaaagtgcacaatccgtaacagggcaggaagacgtccttaaatcgaaaggctttacgatcgttgataccttgcatgtagaggatagcagcgtcaagccactcgtctcgaagaatttcaataagaaagtggtggagaagatgggactggtgtatcttgttcaatactctccggaccagtttaaaagttccaacattgcgaagaaagaactcagaaaagaattgatggatctgggctttaaagtccgctatataagcgaaaattacaagatgatggcgatcgaaggtacagccactcttcagggggtgcaccctatgcaagtttgggcgtataatatgattaaagctccggaagcgtgggctattacgtctggatccctgagcgttaaagtagcagtcctggatacagggatcgaccataatcacccatccttggccaacttcgtgaatactaatcttggccgctcgtttgttggaggaaacaccatggatgttcaaggtcatggcacacatgttgctggcacgattgcatcttatgggagtgtaagcggagtgatgcagagtgcgacactgatcccggtcaaagtgctcgataattctggcagcgggtccctttacggtattacgcagggcatattgtatgccgccgacatcgatgcggacgtcattaacatgtctctgggtggaggaggctataatcagagcatggatgaggctgttcaaacagcagttgctcagggaaccattgtagtagcagcgactggcaatgatggtgcatcgtcgatcagttatcctgctgcctacagcagcgtcattgcggtgggatctgtggactccaatcgtgttcgatcctcgttttctaactatggatctgggcttgaactgatggcaccgggcagcaacatctacagtacgtatcctaatggcagatatcgcagtttgagtggtacaagcatggctactccgcacgttgcgggcgtagctgggctcattcgcgcagccaacccagacatagtggtcgcgcaagcccgtcagattctgcgggataccgcgcaagaagcaggatcgttcacacagtacggctatggaatcgtcgatgctcatgccgccgttgttgctgcatccggtggtagcggcggc

SEQ ID NO: 1254 - protein, 413 aa, synthetic construct
  REGION 1..413: note = Variant of serine peptidase from Bacillus sinesaloumensis
MADQASQANGNQDVIEGELIVSVEPKNGKPDVSIQSAQSVTGQEDVLKSKGFTIVDTLHVEDSSVKPLVSKNFNKKVVEKMGLVYLVQYSPDQFKSSNIAKKELRKELMDLGFKVRYISENYKMMAIEGTATLQGVHPMQVWAYNMIKAPEAWAITSGSLSVKVAVLDTGIDHNHPSLANFVNTNLGRSFVGGNTMDVQGHGTHVAGTIASYGSVSGVMQSATLIPVKVLDNSGSGSLYGITQGILYAADIDADVINMSLGGGGYNQSMDEAVQTAVAQGTIVVAATGNDGASSISYPAAYSSVIAVGSVDSNRVRSSFSNYGSGLELMAPGSNIYSTYPNGRYRSLSGTSMATPHVAGVAGLIRAANPDIVVAQARQILRDTAQEAGSFTQYGYGIVDAHAAVVAASGGSGG

SEQ ID NO: 1255 - DNA, 1239 bp, synthetic construct
  misc_feature 1..1239: note = Variant of serine peptidase from Bacillus sinesaloumensis
  source 1..1239: mol_type = other DNA
atggcagatcaagctagtcaagctaatggaaaccaggacgtcattgaaggcgagctgatcgtttcagtggaaccgaagaacggtaaacctgatgtgagcattcaaagtgcacaatccgtaacagggcaggaagacgtccttaaatcgaaaggctttacgatcgttgataccttgcatgtagaggatagcagcgtcaagccactcgtctcgaagaatttcaataagaaagtggtggagaagatgggactggtgtatcttgttcaatactctccggaccagtttaaaagttccaacattgcgaagaaagaactcagaaaagaattgatggatctgggctttaaagtccgctatataagcgaaaattacaagatgatggcgatcgaaggtacagccactcttcagggggtgagtcctaaccaagtttgggcgtataatatgattaaagctccggaagcgtgggctattacgtctggatccctgagcgttaaagtagcagtcctggatacagggatcgaccataatcacccatccttggccaacttcgtgaatactaatcttggccgctcgtttgttggaggaaacaccatggatgttcaaggtcatggcacacatgttgctggcacgattgcatcttatgggagtgtaagcggagtgatgcagagtgcgacactgatcccggtcaaagtgctcgataattctggcagcgggtccctttacggtattacgcagggcatattgtatgccgccgacatcgatgcggacgtcattaacatgtctctgggtggaggaggctataatcagagcatggatgaggctgttcaaacagcagttgctcagggaaccattgtagtagcagcgactggcaatgatggtgcatcgtcgatcagttatcctgctgcctacagcagcgtcattgcggtgggatctgtggactccaatcgtgttcgatcctcgttttctaactatggatctgggcttgaactgatggcaccgggcagcaacatctacagtacgtatcctaatggcagatatcgcagtttgagtggtacaagcatggctactccgcacgttgcgggcgtagctgggctcattcgcgcagccaacccagacatagtggtcgcgcaagcccgtcagattctgcgggataccgcgcaagaagcaggatcgttcacacagtacggctatggaatcgtcgatgctcatgccgccgttgttgctgcatccggtggtagcggcggc

SEQ ID NO: 1256 - protein, 413 aa, synthetic construct
  REGION 1..413: note = Variant of serine peptidase from Bacillus sinesaloumensis
MADQASQANGNQDVIEGELIVSVEPKNGKPDVSIQSAQSVTGQEDVLKSKGFTIVDTLHVEDSSVKPLVSKNFNKKVVEKMGLVYLVQYSPDQFKSSNIAKKELRKELMDLGFKVRYISENYKMMAIEGTATLQGVSPNQVWAYNMIKAPEAWAITSGSLSVKVAVLDTGIDHNHPSLANFVNTNLGRSFVGGNTMDVQGHGTHVAGTIASYGSVSGVMQSATLIPVKVLDNSGSGSLYGITQGILYAADIDADVINMSLGGGGYNQSMDEAVQTAVAQGTIVVAATGNDGASSISYPAAYSSVIAVGSVDSNRVRSSFSNYGSGLELMAPGSNIYSTYPNGRYRSLSGTSMATPHVAGVAGLIRAANPDIVVAQARQILRDTAQEAGSFTQYGYGIVDAHAAVVAASGGSGG

SEQ ID NO: 1257 - DNA, 1239 bp, synthetic construct
  misc_feature 1..1239: note = Variant of serine peptidase from Bacillus sinesaloumensis
  source 1..1239: mol_type = other DNA
atggcagatcaagctagtcaagctaatggaaaccaggacgtcattgaaggcgagctgatcgtttcagtggaaccgaagaacggtaaacctgatgtgagcattcaaagtgcacaatccgtaacagggcaggaagacgtccttaaatcgaaaggctttacgatcgttgataccttgcatgtagaggatagcagcgtcaagccactcgtctcgaagaatttcaataagaaagtggtggagaagatgggactggtgtatcttgttcaatactctccggaccagtttaaaagttccaacattgcgaagaaagaactcagaaaagaattgatggatctgggctttaaagtccgctatataagcgaaaattacaagatgatggcgatcgaaggtacagccactcttcagggggtgcaccctaaccaagtttgggcgtataatatgattaaagctccggaagcgtgggctattacgtctggatccctgagcgttaaagtagcagtcctggatacagggatcgaccataatcacccatccttggccaacttcgtgaatactaatcttggccgctcgtttgttggaggaaacaccatggatgttcaaggtcatggcacacatgttgctggcacgattgcatcttatgggagtgtaagcggagtgatgcagagtgcgacactgatcccggtcaaagtgctcgataatggtggcagcgggtccctttacggtattacgcagggcatattgtatgccgccgacatcgatgcggacgtcattaacatgtctctgggtggaggaggctataatcagagcatggatgaggctgttcaaacagcagttgctcagggaaccattgtagtagcagcgactggcaatgatggtgcatcgtcgatcagttatcctgctgcctacagcagcgtcattgcggtgggatctgtggactccaatcgtgttcgatcctcgttttctaactatggatctgggcttgaactgatggcaccgggcagcaacatctacagtacgtatcctaatggcagatatcgcagtttgagtggtacaagcatggctactccgcacgttgcgggcgtagctgggctcattcgcgcagccaacccagacatagtggtcgcgcaagcccgtcagattctgcgggataccgcgcaagaagcaggatcgttcacacagtacggctatggaatcgtcgatgctcatgccgccgttgttgctgcatccggtggtagcggcggc

SEQ ID NO: 1258 - protein, 413 aa, synthetic construct
  REGION 1..413: note = Variant of serine peptidase from Bacillus sinesaloumensis
MADQASQANGNQDVIEGELIVSVEPKNGKPDVSIQSAQSVTGQEDVLKSKGFTIVDTLHVEDSSVKPLVSKNFNKKVVEKMGLVYLVQYSPDQFKSSNIAKKELRKELMDLGFKVRYISENYKMMAIEGTATLQGVHPNQVWAYNMIKAPEAWAITSGSLSVKVAVLDTGIDHNHPSLANFVNTNLGRSFVGGNTMDVQGHGTHVAGTIASYGSVSGVMQSATLIPVKVLDNGGSGSLYGITQGILYAADIDADVINMSLGGGGYNQSMDEAVQTAVAQGTIVVAATGNDGASSISYPAAYSSVIAVGSVDSNRVRSSFSNYGSGLELMAPGSNIYSTYPNGRYRSLSGTSMATPHVAGVAGLIRAANPDIVVAQARQILRDTAQEAGSFTQYGYGIVDAHAAVVAASGGSGG

SEQ ID NO: 1259 - DNA, 1239 bp, synthetic construct
  misc_feature 1..1239: note = Variant of serine peptidase from Bacillus sinesaloumensis
  source 1..1239: mol_type = other DNA
atggcagatcaagctagtcaagctaatggaaaccaggacgtcattgaaggcgagctgatcgtttcagtggaaccgaagaacggtaaacctgatgtgagcattcaaagtgcacaatccgtaacagggcaggaagacgtccttaaatcgaaaggctttacgatcgttgataccttgcatgtagaggatagcagcgtcaagccactcgtctcgaagaatttcaataagaaagtggtggagaagatgggactggtgtatcttgttcaatactctccggaccagtttaaaagttccaacattgcgaagaaagaactcagaaaagaattgatggatctgggctttaaagtccgctatataagcgaaaattacaagatgatggcgatcgaaggtacagccactcttcagggggtgcacccttttcaagtttgggcgtataatatgattaaagctccggaagcgtgggctattacgtctggatccctgagcgttaaagtagcagtcctggatacagggatcgaccataatcacccatccttggccaacttcgtgaatactaatcttggccgctcgtttgttggaggaaacaccatggatgttcaaggtcatggcacacatgttgctggcacgattgcatcttatgggagtgtaagcggagtgatgcagagtgcgacactgatcccggtcaaagtgctcgataattctggcagcgggtccctttacggtattacgcagggcatattgtatgccgccgacatcgatgcggacgtcattaacatgtctctgggtggaggaggctataatcagagcatggatgaggctgttcaaacagcagttgctcagggaaccattgtagtagcagcgactggcaatgatggtgcatcgtcgatcagttatcctgctgcctacagcagcgtcattgcggtgggatctgtggactccaatcgtgttcgatcctcgttttctaactatggatctgggcttgaactgatggcaccgggcagcaacatctacagtacgtatcctaatggcagatatcgcagtttgagtggtacaagcatggctactccgcacgttgcgggcgtagctgggctcattcgcgcagccaacccagacatagtggtcgcgcaagcccgtcagattctgcgggataccgcgcaagaagcaggatcgttcacacagtacggctatggaatcgtcgatgctcatgccgccgttgttgctgcatccggtggtagcggcggc

SEQ ID NO: 1260 - protein, 413 aa, synthetic construct
  REGION 1..413: note = Variant of serine peptidase from Bacillus sinesaloumensis
MADQASQANGNQDVIEGELIVSVEPKNGKPDVSIQSAQSVTGQEDVLKSKGFTIVDTLHVEDSSVKPLVSKNFNKKVVEKMGLVYLVQYSPDQFKSSNIAKKELRKELMDLGFKVRYISENYKMMAIEGTATLQGVHPFQVWAYNMIKAPEAWAITSGSLSVKVAVLDTGIDHNHPSLANFVNTNLGRSFVGGNTMDVQGHGTHVAGTIASYGSVSGVMQSATLIPVKVLDNSGSGSLYGITQGILYAADIDADVINMSLGGGGYNQSMDEAVQTAVAQGTIVVAATGNDGASSISYPAAYSSVIAVGSVDSNRVRSSFSNYGSGLELMAPGSNIYSTYPNGRYRSLSGTSMATPHVAGVAGLIRAANPDIVVAQARQILRDTAQEAGSFTQYGYGIVDAHAAVVAASGGSGG

SEQ ID NO: 1261 - DNA, 1239 bp, synthetic construct
  misc_feature 1..1239: note = Variant of serine peptidase from Bacillus sinesaloumensis
  source 1..1239: mol_type = other DNA
atggcagatcaagctagtcaagctaatggaaaccaggacgtcattgaaggcgagctgatcgtttcagtggaaccgaagaacggtaaacctgatgtgagcattcaaagtgcacaatccgtaacagggcaggaagacgtccttaaatcgaaaggctttacgatcgttgataccttgcatgtagaggatagcagcgtcaagccactcgtctcgaagaatttcaataagaaagtggtggagaagatgggactggtgtatcttgttcaatactctccggaccagtttaaaagttccaacattgcgaagaaagaactcagaaaagaattgatggatctgggctttaaagtccgctatataagcgaaaattacaagatgatggcgatcgaaggtacagccactcttcagggggtgcaccctaaccaagtttgggcgtataatatgattaaagctccggaagcgtgggctattacgtctggatccctgagcgttaaagtagcagtcctggatacagggatcgaccataatcacccatccttggccaacttcgtgaatactaatcttggccgctcgtttgttggaggaaacaccatggatgttcaaggtcatggcacacatgttgctggcacgattgcatcttatgggagtgtaagcggagtgatgcagagtgcgacactgatcccggtcaaagtgctcgataattctggcagcgggtccctttacggtattacgcagggcatattgtatgccgccgacatcgatgcggacgtcattaacatgtctctgggtggaggaggctataatattagcatggatgaggctgttcaaacagcagttgctcagggaaccattgtagtagcagcgactggcaatgatggtgcatcgtcgatcagttatcctgctgcctacagcagcgtcattgcggtgggatctgtggactccaatcgtgttcgatcctcgttttctaactatggatctgggcttgaactgatggcaccgggcagcaacatctacagtacgtatcctaatggcagatatcgcagtttgagtggtacaagcatggctactccgcacgttgcgggcgtagctgggctcattcgcgcagccaacccagacatagtggtcgcgcaagcccgtcagattctgcgggataccgcgcaagaagcaggatcgttcacacagtacggctatggaatcgtcgatgctcatgccgccgttgttgctgcatccggtggtagcggcggc

SEQ ID NO: 1262 - protein, 413 aa, synthetic construct
  REGION 1..413: note = Variant of serine peptidase from Bacillus sinesaloumensis
MADQASQANGNQDVIEGELIVSVEPKNGKPDVSIQSAQSVTGQEDVLKSKGFTIVDTLHVEDSSVKPLVSKNFNKKVVEKMGLVYLVQYSPDQFKSSNIAKKELRKELMDLGFKVRYISENYKMMAIEGTATLQGVHPNQVWAYNMIKAPEAWAITSGSLSVKVAVLDTGIDHNHPSLANFVNTNLGRSFVGGNTMDVQGHGTHVAGTIASYGSVSGVMQSATLIPVKVLDNSGSGSLYGITQGILYAADIDADVINMSLGGGGYNISMDEAVQTAVAQGTIVVAATGNDGASSISYPAAYSSVIAVGSVDSNRVRSSFSNYGSGLELMAPGSNIYSTYPNGRYRSLSGTSMATPHVAGVAGLIRAANPDIVVAQARQILRDTAQEAGSFTQYGYGIVDAHAAVVAASGGSGG

SEQ ID NO: 1263 - DNA, 1239 bp, synthetic construct
  misc_feature 1..1239: note = Variant of serine peptidase from Bacillus sinesaloumensis
  source 1..1239: mol_type = other DNA
atggcagatcaagctagtcaagctaatggaaaccaggacgtcattgaaggcgagctgatcgtttcagtggaaccgaagaacggtaaacctgatgtgagcattcaaagtgcacaatccgtaacagggcaggaagacgtccttaaatcgaaaggctttacgatcgttgataccttgcatgtagaggatagcagcgtcaagccactcgtctcgaagaatttcaataagaaagtggtggagaagatgggactggtgtatcttgttcaatactctccggaccagtttaaaagttccaacattgcgaagaaagaactcagaaaagaattgatggatctgggctttaaagtccgctatataagcgaaaattacaagatgatggcgatcgaaggtacagccactcttcagggggtgcaccctaaccaagtttgggcgtataatatgattaaagctccggaagcgtgggctattacgtctggatccctgagcgttaaagtagcagtcctggatacagggatcgaccataatcacccatccttggccaacttcgtgaatactaatcttggccgctcgtttgttggaggaaacaccatggatgttcaaggtcatggcacacatgttgctggcacgattgcatcttatgggagtgtaagcggagtgatgcagctggcgacactgatcccggtcaaagtgctcgataattctggcagcgggtccctttacggtattacgcagggcatattgtatgccgccgacatcgatgcggacgtcattaacatgtctctgggtggaggaggctataatcagagcatggatgaggctgttcaaacagcagttgctcagggaaccattgtagtagcagcgactggcaatgatggtgcatcgtcgatcagttatcctgctgcctacagcagcgtcattgcggtgggatctgtggactccaatcgtgttcgatcctcgttttctaactatggatctgggcttgaactgatggcaccgggcagcaacatctacagtacgtatcctaatggcagatatcgcagtttgagtggtacaagcatggctactccgcacgttgcgggcgtagctgggctcattcgcgcagccaacccagacatagtggtcgcgcaagcccgtcagattctgcgggataccgcgcaagaagcaggatcgttcacacagtacggctatggaatcgtcgatgctcatgccgccgttgttgctgcatccggtggtagcggcggc

SEQ ID NO: 1264 - protein, 413 aa, synthetic construct
  REGION 1..413: note = Variant of serine peptidase from Bacillus sinesaloumensis
MADQASQANGNQDVIEGELIVSVEPKNGKPDVSIQSAQSVTGQEDVLKSKGFTIVDTLHVEDSSVKPLVSKNFNKKVVEKMGLVYLVQYSPDQFKSSNIAKKELRKELMDLGFKVRYISENYKMMAIEGTATLQGVHPNQVWAYNMIKAPEAWAITSGSLSVKVAVLDTGIDHNHPSLANFVNTNLGRSFVGGNTMDVQGHGTHVAGTIASYGSVSGVMQLATLIPVKVLDNSGSGSLYGITQGILYAADIDADVINMSLGGGGYNQSMDEAVQTAVAQGTIVVAATGNDGASSISYPAAYSSVIAVGSVDSNRVRSSFSNYGSGLELMAPGSNIYSTYPNGRYRSLSGTSMATPHVAGVAGLIRAANPDIVVAQARQILRDTAQEAGSFTQYGYGIVDAHAAVVAASGGSGG

SEQ ID NO: 1265 - DNA, 1239 bp, synthetic construct
  misc_feature 1..1239: note = Variant of serine peptidase from Bacillus sinesaloumensis
  source 1..1239: mol_type = other DNA
atggcagatcaagctagtcaagctaatggaaaccaggacgtcattgaaggcgagctgatcgtttcagtggaaccgaagaacggtaaacctgatgtgagcattcaaagtgcacaatccgtaacagggcaggaagacgtccttaaatcgaaaggctttacgatcgttgataccttgcatgtagaggatagcagcgtcaagccactcgtctcgaagaatttcaataagaaagtggtggagaagatgggactggtgtatcttgttcaatactctccggaccagtttaaaagttccaacattgcgaagaaagaactcagaaaagaattgatggatctgggctttaaagtccgctatataagcgaaaattacaagatgatggcgatcgaaggtacagccactcttcagggggtgcaccctaaccaagtttgggcgtataatatgattaaagctccggaagcgtgggctattacgtctggatccctgagcgttaaagtagcagtcctggatacagggatcgacagtaatcacccatccttggccaacttcgtgaatactaatcttggccgctcgtttgttggaggaaacaccatggatgttcaaggtcatggcacacatgttgctggcacgattgcatcttatgggagtgtaagcggagtgatgcagagtgcgacactgatcccggtcaaagtgctcgataattctggcagcgggtccctttacggtattacgcagggcatattgtatgccgccgacatcgatgcggacgtcattaacatgtctctgggtggaggaggctataatcagagcatggatgaggctgttcaaacagcagttgctcagggaaccattgtagtagcagcgactggcaatgatggtgcatcgtcgatcagttatcctgctgcctacagcagcgtcattgcggtgggatctgtggactccaatcgtgttcgatcctcgttttctaactatggatctgggcttgaactgatggcaccgggcagcaacatctacagtacgtatcctaatggcagatatcgcagtttgagtggtacaagcatggctactccgcacgttgcgggcgtagctgggctcattcgcgcagccaacccagacatagtggtcgcgcaagcccgtcagattctgcgggataccgcgcaagaagcaggatcgttcacacagtacggctatggaatcgtcgatgctcatgccgccgttgttgctgcatccggtggtagcggcggc

SEQ ID NO: 1266 - protein, 413 aa, synthetic construct
  REGION 1..413: note = Variant of serine peptidase from Bacillus sinesaloumensis
MADQASQANGNQDVIEGELIVSVEPKNGKPDVSIQSAQSVTGQEDVLKSKGFTIVDTLHVEDSSVKPLVSKNFNKKVVEKMGLVYLVQYSPDQFKSSNIAKKELRKELMDLGFKVRYISENYKMMAIEGTATLQGVHPNQVWAYNMIKAPEAWAITSGSLSVKVAVLDTGIDSNHPSLANFVNTNLGRSFVGGNTMDVQGHGTHVAGTIASYGSVSGVMQSATLIPVKVLDNSGSGSLYGITQGILYAADIDADVINMSLGGGGYNQSMDEAVQTAVAQGTIVVAATGNDGASSISYPAAYSSVIAVGSVDSNRVRSSFSNYGSGLELMAPGSNIYSTYPNGRYRSLSGTSMATPHVAGVAGLIRAANPDIVVAQARQILRDTAQEAGSFTQYGYGIVDAHAAVVAASGGSGG

SEQ ID NO: 1267 - DNA, 1239 bp, synthetic construct
  misc_feature 1..1239: note = Variant of serine peptidase from Bacillus sinesaloumensis
  source 1..1239: mol_type = other DNA
atggcagatcaagctagtcaagctaatggaaaccaggacgtcattgaaggcgagctgatcgtttcagtggaaccgaagaacggtaaacctgatgtgagcattcaaagtgcacaatccgtaacagggcaggaagacgtccttaaatcgaaaggctttacgatcgttgataccttgcatgtagaggatagcagcgtcaagccactcgtctcgaagaatttcaataagaaagtggtggagaagatgggactggtgtatcttgttcaatactctccggaccagtttaaaagttccaacattgcgaagaaagaactcagaaaagaattgatggatctgggctttaaagtccgctatataagcgaaaattacaagatgatggcgatcgaaggtacagccactcttcagggggtgcaccctaaccaagtttgggcgtataatatgattaaagctccggaagcgtgggctattacgtctggatccctgagcgttaaagtagcagtcctggatacagggatcgaccataatcacccatccttggccaacttcgtgaatactaatcttggccgctcgtttgttggaggaaacaccatggatgttcaaggtcatggcacacatgttgctggcacgattgcatcttatgggagtgtaagcggagtgatgcagagtgcgacactgatcccggtcaaagtgctcgataattctggcagcgggtccctttacggtattacgcagggcatattgtatgccgccgacatcgatgcggacgtcattaacatgtctctgggtggaggaggctataatcagagcatggatgaggctgttcaaacagcagttgctcagggaaccattgtagtagcagcgactggcaatgatggtgcatcgtcgatcagttatcctgctgcctaccctagcgtcattgcggtgggatctgtggactccaatcgtgttcgatcctcgttttctaactatggatctgggcttgaactgatggcaccgggcagcaacatctacagtacgtatcctaatggcagatatcgcagtttgagtggtacaagcatggctactccgcacgttgcgggcgtagctgggctcattcgcgcagccaacccagacatagtggtcgcgcaagcccgtcagattctgcgggataccgcgcaagaagcaggatcgttcacacagtacggctatggaatcgtcgatgctcatgccgccgttgttgctgcatccggtggtagcggcggc

SEQ ID NO: 1268 - protein, 413 aa, synthetic construct
  REGION 1..413: note = Variant of serine peptidase from Bacillus sinesaloumensis
MADQASQANGNQDVIEGELIVSVEPKNGKPDVSIQSAQSVTGQEDVLKSKGFTIVDTLHVEDSSVKPLVSKNFNKKVVEKMGLVYLVQYSPDQFKSSNIAKKELRKELMDLGFKVRYISENYKMMAIEGTATLQGVHPNQVWAYNMIKAPEAWAITSGSLSVKVAVLDTGIDHNHPSLANFVNTNLGRSFVGGNTMDVQGHGTHVAGTIASYGSVSGVMQSATLIPVKVLDNSGSGSLYGITQGILYAADIDADVINMSLGGGGYNQSMDEAVQTAVAQGTIVVAATGNDGASSISYPAAYPSVIAVGSVDSNRVRSSFSNYGSGLELMAPGSNIYSTYPNGRYRSLSGTSMATPHVAGVAGLIRAANPDIVVAQARQILRDTAQEAGSFTQYGYGIVDAHAAVVAASGGSGG

SEQ ID NO: 1269 - DNA, 1239 bp, synthetic construct
  misc_feature 1..1239: note = Variant of serine peptidase from Bacillus sinesaloumensis
  source 1..1239: mol_type = other DNA
atggcagatcaagctagtcaagctaatggaaaccaggacgtcattgaaggcgagctgatcgtttcagtggaaccgaagaacggtaaacctgatgtgagcattcaaagtgcacaatccgtaacagggcaggaagacgtccttaaatcgaaaggctttacgatcgttgataccttgcatgtagaggatagcagcgtcaagccactcgtctcgaagaatttcaataagaaagtggtggagaagatgggactggtgtatcttgttcaatactctccggaccagtttaaaagttccaacattgcgaagaaagaactcagaaaagaattgatggatctgggctttaaagtccgctatataagcgaaaattacaagatgatggcgatcgaaggtacagccactcttcagggggtgcaccctaaccaagtttgggcgtataatatgattaaagctccggaagcgtgggctattacgtctggatccctgagcgttaaagtagcagtcctggatacagggatcgaccataatcacccatccttggccaacttcgtgaatactaatcttggccgctcgtttgttggaggaaacaccatggatgttcaaggtcatggcacacatgttgctggcacgattgcatcttatgggagtgtaagcggagtgatgcaggtggcgacactgatcccggtcaaagtgctcgataattctggcagcgggtccctttacggtattacgcagggcatattgtatgccgccgacatcgatgcggacgtcattaacatgtctctgggtggaggaggctataatcagagcatggatgaggctgttcaaacagcagttgctcagggaaccattgtagtagcagcgactggcaatgatggtgcatcgtcgatcagttatcctgctgcctacagcagcgtcattgcggtgggatctgtggactccaatcgtgttcgatcctcgttttctaactatggatctgggcttgaactgatggcaccgggcagcaacatctacagtacgtatcctaatggcagatatcgcagtttgagtggtacaagcatggctactccgcacgttgcgggcgtagctgggctcattcgcgcagccaacccagacatagtggtcgcgcaagcccgtcagattctgcgggataccgcgcaagaagcaggatcgttcacacagtacggctatggaatcgtcgatgctcatgccgccgttgttgctgcatccggtggtagcggcggc

SEQ ID NO: 1270 - protein, 413 aa, synthetic construct
  REGION 1..413: note = Variant of serine peptidase from Bacillus sinesaloumensis
MADQASQANGNQDVIEGELIVSVEPKNGKPDVSIQSAQSVTGQEDVLKSKGFTIVDTLHVEDSSVKPLVSKNFNKKVVEKMGLVYLVQYSPDQFKSSNIAKKELRKELMDLGFKVRYISENYKMMAIEGTATLQGVHPNQVWAYNMIKAPEAWAITSGSLSVKVAVLDTGIDHNHPSLANFVNTNLGRSFVGGNTMDVQGHGTHVAGTIASYGSVSGVMQVATLIPVKVLDNSGSGSLYGITQGILYAADIDADVINMSLGGGGYNQSMDEAVQTAVAQGTIVVAATGNDGASSISYPAAYSSVIAVGSVDSNRVRSSFSNYGSGLELMAPGSNIYSTYPNGRYRSLSGTSMATPHVAGVAGLIRAANPDIVVAQARQILRDTAQEAGSFTQYGYGIVDAHAAVVAASGGSGG

SEQ ID NO: 1271 - DNA, 1239 bp, synthetic construct
  misc_feature 1..1239: note = Variant of serine peptidase from Bacillus sinesaloumensis
  source 1..1239: mol_type = other DNA
atggcagatcaagctagtcaagctaatggaaaccaggacgtcattgaaggcgagctgatcgtttcagtggaaccgaagaacggtaaacctgatgtgagcattcaaagtgcacaatccgtaacagggcaggaagacgtccttaaatcgaaaggctttacgatcgttgataccttgcatgtagaggatagcagcgtcaagccactcgtctcgaagaatttcaataagaaagtggtggagaagatgggactggtgtatcttgttcaatactctccggaccagtttaaaagttccaacattgcgaagaaagaactcagaaaagaattgatggatctgggctttaaagtccgctatataagcgaaaattacaagatgatggcgatcgaaggtacagccactcttcagggggtgcaccctaaccaagtttgggcgtataatatgattaaagctccggaagcgtgggctattacgtctggatccctgagcgttaaagtagcagtcctggatacagggatcgaccataatcacccatccttggccaacttcgtgaatactaatcttggccgctcgtttgttggaggaaacaccatggatgttcaaggtcatggcacacatgttgctggcacgattgcatcttatgggagtgtaagcggagtgatgcagagtgcgacactgatcccggtcaaagtgctcgataattctggcagcgggtcccttatgggtattacgcagggcatattgtatgccgccgacatcgatgcggacgtcattaacatgtctctgggtggaggaggctataatcagagcatggatgaggctgttcaaacagcagttgctcagggaaccattgtagtagcagcgactggcaatgatggtgcatcgtcgatcagttatcctgctgcctacagcagcgtcattgcggtgggatctgtggactccaatcgtgttcgatcctcgttttctaactatggatctgggcttgaactgatggcaccgggcagcaacatctacagtacgtatcctaatggcagatatcgcagtttgagtggtacaagcatggctactccgcacgttgcgggcgtagctgggctcattcgcgcagccaacccagacatagtggtcgcgcaagcccgtcagattctgcgggataccgcgcaagaagcaggatcgttcacacagtacggctatggaatcgtcgatgctcatgccgccgttgttgctgcatccggtggtagcggcggc

SEQ ID NO: 1272 - protein, 413 aa, synthetic construct
  REGION 1..413: note = Variant of serine peptidase from Bacillus sinesaloumensis
MADQASQANGNQDVIEGELIVSVEPKNGKPDVSIQSAQSVTGQEDVLKSKGFTIVDTLHVEDSSVKPLVSKNFNKKVVEKMGLVYLVQYSPDQFKSSNIAKKELRKELMDLGFKVRYISENYKMMAIEGTATLQGVHPNQVWAYNMIKAPEAWAITSGSLSVKVAVLDTGIDHNHPSLANFVNTNLGRSFVGGNTMDVQGHGTHVAGTIASYGSVSGVMQSATLIPVKVLDNSGSGSLMGITQGILYAADIDADVINMSLGGGGYNQSMDEAVQTAVAQGTIVVAATGNDGASSISYPAAYSSVIAVGSVDSNRVRSSFSNYGSGLELMAPGSNIYSTYPNGRYRSLSGTSMATPHVAGVAGLIRAANPDIVVAQARQILRDTAQEAGSFTQYGYGIVDAHAAVVAASGGSGG

SEQ ID NO: 1273 - DNA, 1239 bp, synthetic construct
  misc_feature 1..1239: note = Variant of serine peptidase from Bacillus sinesaloumensis
  source 1..1239: mol_type = other DNA
atggcagatcaagctagtcaagctaatggaaaccaggacgtcattgaaggcgagctgatcgtttcagtggaaccgaagaacggtaaacctgatgtgagcattcaaagtgcacaatccgtaacagggcaggaagacgtccttaaatcgaaaggctttacgatcgttgataccttgcatgtagaggatagcagcgtcaagccactcgtctcgaagaatttcaataagaaagtggtggagaagatgggactggtgtatcttgttcaatactctccggaccagtttaaaagttccaacattgcgaagaaagaactcagaaaagaattgatggatctgggctttaaagtccgctatataagcgaaaattacaagatgatggcgatcgaaggtacagccactcttcagggggtgcaccctaaccaagtttgggcgtataatatgattaaagctccggaagcgtgggctattacgtctggatccctgagcgttaaagtagcagtcctggatacagggatcgaccataatcacccatccttggccaacttcgtgaatactaatcttggccgctcgtttgttggaggaaacaccatggatgttcaaggtcatggcacacatgttgctggcacgattgcatcttatgggagtgtaagcggagtgatgcagagtgcgacactgatcccggtcaaagtgctcgataattctggcagcgggtccctttacggtattacgcagggcatattgtatgccgccgacatcgatgcggacgtcattaacatgtctctgggtggaggaggctataatcagagcatggatgaggctgttcaaacagcagttgctcagggaaccattgtagtagcagcgactggcaatgggggtgcatcgtcgatcagttatcctgctgcctacagcagcgtcattgcggtgggatctgtggactccaatcgtgttcgatcctcgttttctaactatggatctgggcttgaactgatggcaccgggcagcaacatctacagtacgtatcctaatggcagatatcgcagtttgagtggtacaagcatggctactccgcacgttgcgggcgtagctgggctcattcgcgcagccaacccagacatagtggtcgcgcaagcccgtcagattctgcgggataccgcgcaagaagcaggatcgttcacacagtacggctatggaatcgtcgatgctcatgccgccgttgttgctgcatccggtggtagcggcggc

SEQ ID NO: 1274 - protein, 413 aa, synthetic construct
  REGION 1..413: note = Variant of serine peptidase from Bacillus sinesaloumensis
MADQASQANGNQDVIEGELIVSVEPKNGKPDVSIQSAQSVTGQEDVLKSKGFTIVDTLHVEDSSVKPLVSKNFNKKVVEKMGLVYLVQYSPDQFKSSNIAKKELRKELMDLGFKVRYISENYKMMAIEGTATLQGVHPNQVWAYNMIKAPEAWAITSGSLSVKVAVLDTGIDHNHPSLANFVNTNLGRSFVGGNTMDVQGHGTHVAGTIASYGSVSGVMQSATLIPVKVLDNSGSGSLYGITQGILYAADIDADVINMSLGGGGYNQSMDEAVQTAVAQGTIVVAATGNGGASSISYPAAYSSVIAVGSVDSNRVRSSFSNYGSGLELMAPGSNIYSTYPNGRYRSLSGTSMATPHVAGVAGLIRAANPDIVVAQARQILRDTAQEAGSFTQYGYGIVDAHAAVVAASGGSGG

SEQ ID NO: 1275 - DNA, 1239 bp, synthetic construct
  misc_feature 1..1239: note = Variant of serine peptidase from Bacillus sinesaloumensis
  source 1..1239: mol_type = other DNA
atggcagatcaagctagtcaagctaatggaaaccaggacgtcattgaaggcgagctgatcgtttcagtggaaccgaagaacggtaaacctgatgtgagcattcaaagtgcacaatccgtaacagggcaggaagacgtccttaaatcgaaaggctttacgatcgttgataccttgcatgtagaggatagcagcgtcaagccactcgtctcgaagaatttcaataagaaagtggtggagaagatgggactggtgtatcttgttcaatactctccggaccagtttaaaagttccaacattgcgaagaaagaactcagaaaagaattgatggatctgggctttaaagtccgctatataagcgaaaattacaagatgatggcgatcgaaggtacagccactcttcagggggtgcaccctaaccaagtttgggcgtataatatgattaaagctccggaagcgtgggctattacgtctggatccctgagcgttcatgtagcagtcctggatacagggatcgaccataatcacccatccttggccaacttcgtgaatactaatcttggccgctcgtttgttggaggaaacaccatggatgttcaaggtcatggcacacatgttgctggcacgattgcatcttatgggagtgtaagcggagtgatgcagagtgcgacactgatcccggtcaaagtgctcgataattctggcagcgggtccctttacggtattacgcagggcatattgtatgccgccgacatcgatgcggacgtcattaacatgtctctgggtggaggaggctataatcagagcatggatgaggctgttcaaacagcagttgctcagggaaccattgtagtagcagcgactggcaatgatggtgcatcgtcgatcagttatcctgctgcctacagcagcgtcattgcggtgggatctgtggactccaatcgtgttcgatcctcgttttctaactatggatctgggcttgaactgatggcaccgggcagcaacatctacagtacgtatcctaatggcagatatcgcagtttgagtggtacaagcatggctactccgcacgttgcgggcgtagctgggctcattcgcgcagccaacccagacatagtggtcgcgcaagcccgtcagattctgcgggataccgcgcaagaagcaggatcgttcacacagtacggctatggaatcgtcgatgctcatgccgccgttgttgctgcatccggtggtagcggcggc

SEQ ID NO: 1276 - protein, 413 aa, synthetic construct
  REGION 1..413: note = Variant of serine peptidase from Bacillus sinesaloumensis
MADQASQANGNQDVIEGELIVSVEPKNGKPDVSIQSAQSVTGQEDVLKSKGFTIVDTLHVEDSSVKPLVSKNFNKKVVEKMGLVYLVQYSPDQFKSSNIAKKELRKELMDLGFKVRYISENYKMMAIEGTATLQGVHPNQVWAYNMIKAPEAWAITSGSLSVHVAVLDTGIDHNHPSLANFVNTNLGRSFVGGNTMDVQGHGTHVAGTIASYGSVSGVMQSATLIPVKVLDNSGSGSLYGITQGILYAADIDADVINMSLGGGGYNQSMDEAVQTAVAQGTIVVAATGNDGASSISYPAAYSSVIAVGSVDSNRVRSSFSNYGSGLELMAPGSNIYSTYPNGRYRSLSGTSMATPHVAGVAGLIRAANPDIVVAQARQILRDTAQEAGSFTQYGYGIVDAHAAVVAASGGSGG

SEQ ID NO: 1277 - DNA, 1239 bp, synthetic construct
  misc_feature 1..1239: note = Variant of serine peptidase from Bacillus sinesaloumensis
  source 1..1239: mol_type = other DNA
atggcagatcaagctagtcaagctaatggaaaccaggacgtcattgaaggcgagctgatcgtttcagtggaaccgaagaacggtaaacctgatgtgagcattcaaagtgcacaatccgtaacagggcaggaagacgtccttaaatcgaaaggctttacgatcgttgataccttgcatgtagaggatagcagcgtcaagccactcgtctcgaagaatttcaataagaaagtggtggagaagatgggactggtgtatcttgttcaatactctccggaccagtttaaaagttccaacattgcgaagaaagaactcagaaaagaattgatggatctgggctttaaagtccgctatataagcgaaaattacaagatgatggcgatcgaaggtacagccactcttcagggggtgcaccctaaccaagtttgggcgtataatatgattaaagctccggaagcgtgggctattacgtctggatccctgagcgttaaagtagcagtcctggatacagggatcgaccataatcacccatccttggccaacttcgtgaatactaatcttggccgctcgtttgttggaggaaacaccatggatgttcaaggtcatggcacacatgttgctggcacgattgcatcttatgggagtgtaagcggagtgatgcagagtgcgacactgatcccggtcaaagtgctcgataattctggcagcgggtccctttacggtattacgcagggcatattgtatgccgccgacatcgatgcggacgtcattaacatgtctctgggtggaggaggctataatcagagcatggatgaggctgttcaaacagcagttgctcagggaaccattgtagtagcagcgactggcaatgatggtgtttcgtcgatcagttatcctgctgcctacagcagcgtcattgcggtgggatctgtggactccaatcgtgttcgatcctcgttttctaactatggatctgggcttgaactgatggcaccgggcagcaacatctacagtacgtatcctaatggcagatatcgcagtttgagtggtacaagcatggctactccgcacgttgcgggcgtagctgggctcattcgcgcagccaacccagacatagtggtcgcgcaagcccgtcagattctgcgggataccgcgcaagaagcaggatcgttcacacagtacggctatggaatcgtcgatgctcatgccgccgttgttgctgcatccggtggtagcggcggc

SEQ ID NO: 1278 - protein, 413 aa, synthetic construct
  REGION 1..413: note = Variant of serine peptidase from Bacillus sinesaloumensis
MADQASQANGNQDVIEGELIVSVEPKNGKPDVSIQSAQSVTGQEDVLKSKGFTIVDTLHVEDSSVKPLVSKNFNKKVVEKMGLVYLVQYSPDQFKSSNIAKKELRKELMDLGFKVRYISENYKMMAIEGTATLQGVHPNQVWAYNMIKAPEAWAITSGSLSVKVAVLDTGIDHNHPSLANFVNTNLGRSFVGGNTMDVQGHGTHVAGTIASYGSVSGVMQSATLIPVKVLDNSGSGSLYGITQGILYAADIDADVINMSLGGGGYNQSMDEAVQTAVAQGTIVVAATGNDGVSSISYPAAYSSVIAVGSVDSNRVRSSFSNYGSGLELMAPGSNIYSTYPNGRYRSLSGTSMATPHVAGVAGLIRAANPDIVVAQARQILRDTAQEAGSFTQYGYGIVDAHAAVVAASGGSGG

SEQ ID NO: 1279 - DNA, 1239 bp, synthetic construct
  misc_feature 1..1239: note = Variant of serine peptidase from Bacillus sinesaloumensis
  source 1..1239: mol_type = other DNA
atggcagatcaagctagtcaagctaatggaaaccaggacgtcattgaaggcgagctgatcgtttcagtggaaccgaagaacggtaaacctgatgtgagcattcaaagtgcacaatccgtaacagggcaggaagacgtccttaaatcgaaaggctttacgatcgttgataccttgcatgtagaggatagcagcgtcaagccactcgtctcgaagaatttcaataagaaagtggtggagaagatgggactggtgtatcttgttcaatactctccggaccagtttaaaagttccaacattgcgaagaaagaactcagaaaagaattgatggatctgggctttaaagtccgctatataagcgaaaattacaagatgatggcgatcgaaggtacagccactcttcagggggtgcaccctaaccaagtttgggcgtataatatgattaaagctccggaagcgtgggctattacgtctggatccctgagcgttaaagtagcagtcctggatacagggatcgaccataatcacccatccttggccaacttcgtgaatactaatcttggccgctcgtttgttggaggaaacaccatggatgttcaaggtcatggcacacatgttgctggcacgattgcatcttatgggagtgtaagcggagtgatgcagagtgcgacactgatcccggtcaaagtgctcgataattctggcagcgggtccctttacggtattacgcagggcatagtgtatgccgccgacatcgatgcggacgtcattaacatgtctctgggtggaggaggctataatcagagcatggatgaggctgttcaaacagcagttgctcagggaaccattgtagtagcagcgactggcaatgatggtgcatcgtcgatcagttatcctgctgcctacagcagcgtcattgcggtgggatctgtggactccaatcgtgttcgatcctcgttttctaactatggatctgggcttgaactgatggcaccgggcagcaacatctacagtacgtatcctaatggcagatatcgcagtttgagtggtacaagcatggctactccgcacgttgcgggcgtagctgggctcattcgcgcagccaacccagacatagtggtcgcgcaagcccgtcagattctgcgggataccgcgcaagaagcaggatcgttcacacagtacggctatggaatcgtcgatgctcatgccgccgttgttgctgcatccggtggtagcggcggc

SEQ ID NO: 1280 - protein, 413 aa, synthetic construct
  REGION 1..413: note = Variant of serine peptidase from Bacillus sinesaloumensis
MADQASQANGNQDVIEGELIVSVEPKNGKPDVSIQSAQSVTGQEDVLKSKGFTIVDTLHVEDSSVKPLVSKNFNKKVVEKMGLVYLVQYSPDQFKSSNIAKKELRKELMDLGFKVRYISENYKMMAIEGTATLQGVHPNQVWAYNMIKAPEAWAITSGSLSVKVAVLDTGIDHNHPSLANFVNTNLGRSFVGGNTMDVQGHGTHVAGTIASYGSVSGVMQSATLIPVKVLDNSGSGSLYGITQGIVYAADIDADVINMSLGGGGYNQSMDEAVQTAVAQGTIVVAATGNDGASSISYPAAYSSVIAVGSVDSNRVRSSFSNYGSGLELMAPGSNIYSTYPNGRYRSLSGTSMATPHVAGVAGLIRAANPDIVVAQARQILRDTAQEAGSFTQYGYGIVDAHAAVVAASGGSGG

SEQ ID NO: 1281 - DNA, 1239 bp, synthetic construct
  misc_feature 1..1239: note = Variant of serine peptidase from Bacillus sinesaloumensis
  source 1..1239: mol_type = other DNA
atggcagatcaagctagtcaagctaatggaaaccaggacgtcattgaaggcgagctgatcgtttcagtggaaccgaagaacggtaaacctgatgtgagcattcaaagtgcacaatccgtaacagggcaggaagacgtccttaaatcgaaaggctttacgatcgttgataccttgcatgtagaggatagcagcgtcaagccactcgtctcgaagaatttcaataagaaagtggtggagaagatgggactggtgtatcttgttcaatactctccggaccagtttaaaagttccaacattgcgaagaaagaactcagaaaagaattgatggatctgggctttaaagtccgctatataagcgaaaattacaagatgatggcgatcgaaggtacagccactcttcagggggtgcaccctaaccaagtttgggcgtataatatgattaaagctccggaagcgtgggctattacgtctggatccctgagcgttaaagtagcagtcctggatacagggatcgaccataatcacccatccttggccaacttcgtgaatactaatcttggccgctcgtttgttggaggaaacaccatggatgttcaaggtcatggcacacatgttgctggcacgattgcatcttatgggaatgtaagcggagtgatgcagagtgcgacactgatcccggtcaaagtgctcgataattctggcagcgggtccctttacggtattacgcagggcatattgtatgccgccgacatcgatgcggacgtcattaacatgtctctgggtggaggaggctataatcagagcatggatgaggctgttcaaacagcagttgctcagggaaccattgtagtagcagcgactggcaatgatggtgcatcgtcgatcagttatcctgctgcctacagcagcgtcattgcggtgggatctgtggactccaatcgtgttcgatcctcgttttctaactatggatctgggcttgaactgatggcaccgggcagcaacatctacagtacgtatcctaatggcagatatcgcagtttgagtggtacaagcatggctactccgcacgttgcgggcgtagctgggctcattcgcgcagccaacccagacatagtggtcgcgcaagcccgtcagattctgcgggataccgcgcaagaagcaggatcgttcacacagtacggctatggaatcgtcgatgctcatgccgccgttgttgctgcatccggtggtagcggcggc

SEQ ID NO: 1282 - protein, 413 aa, synthetic construct
  REGION 1..413: note = Variant of serine peptidase from Bacillus sinesaloumensis
MADQASQANGNQDVIEGELIVSVEPKNGKPDVSIQSAQSVTGQEDVLKSKGFTIVDTLHVEDSSVKPLVSKNFNKKVVEKMGLVYLVQYSPDQFKSSNIAKKELRKELMDLGFKVRYISENYKMMAIEGTATLQGVHPNQVWAYNMIKAPEAWAITSGSLSVKVAVLDTGIDHNHPSLANFVNTNLGRSFVGGNTMDVQGHGTHVAGTIASYGNVSGVMQSATLIPVKVLDNSGSGSLYGITQGILYAADIDADVINMSLGGGGYNQSMDEAVQTAVAQGTIVVAATGNDGASSISYPAAYSSVIAVGSVDSNRVRSSFSNYGSGLELMAPGSNIYSTYPNGRYRSLSGTSMATPHVAGVAGLIRAANPDIVVAQARQILRDTAQEAGSFTQYGYGIVDAHAAVVAASGGSGG

SEQ ID NO: 1283 - DNA, 1239 bp, synthetic construct
  misc_feature 1..1239: note = Variant of serine peptidase from Bacillus sinesaloumensis
  source 1..1239: mol_type = other DNA
atggcagatcaagctagtcaagctaatggaaaccaggacgtcattgaaggcgagctgatcgtttcagtggaaccgaagaacggtaaacctgatgtgagcattcaaagtgcacaatccgtaacagggcaggaagacgtccttaaatcgaaaggctttacgatcgttgataccttgcatgtagaggatagcagcgtcaagccactcgtctcgaagaatttcaataagaaagtggtggagaagatgggactggtgtatcttgttcaatactctccggaccagtttaaaagttccaacattgcgaagaaagaactcagaaaagaattgatggatctgggctttaaagtccgctatataagcgaaaattacaagatgatggcgatcgaaggtacagccactcttcagggggtgcaccctaaccaagtttgggcgtataatatgattaaagctccggaagcgtgggctattacgtctggatccctgagcgttaaagtagcagtcctggatacagggatcgaccataatcacccatccttggccaacttcgtgaatactaatcttggccgctcgtttgttggaggaaacaccatggatgttcaaggtcatggcacacatgttgctggcacgattgcatcttatgggagtgtaagcggagtgatgcagagtgcgacactgatcccggtcaaagtgctcgataattctggcagcgggtccctttacggtattacgagtggcatattgtatgccgccgacatcgatgcggacgtcattaacatgtctctgggtggaggaggctataatcagagcatggatgaggctgttcaaacagcagttgctcagggaaccattgtagtagcagcgactggcaatgatggtgcatcgtcgatcagttatcctgctgcctacagcagcgtcattgcggtgggatctgtggactccaatcgtgttcgatcctcgttttctaactatggatctgggcttgaactgatggcaccgggcagcaacatctacagtacgtatcctaatggcagatatcgcagtttgagtggtacaagcatggctactccgcacgttgcgggcgtagctgggctcattcgcgcagccaacccagacatagtggtcgcgcaagcccgtcagattctgcgggataccgcgcaagaagcaggatcgttcacacagtacggctatggaatcgtcgatgctcatgccgccgttgttgctgcatccggtggtagcggcggc

SEQ ID NO: 1284 - protein, 413 aa, synthetic construct
  REGION 1..413: note = Variant of serine peptidase from Bacillus sinesaloumensis
MADQASQANGNQDVIEGELIVSVEPKNGKPDVSIQSAQSVTGQEDVLKSKGFTIVDTLHVEDSSVKPLVSKNFNKKVVEKMGLVYLVQYSPDQFKSSNIAKKELRKELMDLGFKVRYISENYKMMAIEGTATLQGVHPNQVWAYNMIKAPEAWAITSGSLSVKVAVLDTGIDHNHPSLANFVNTNLGRSFVGGNTMDVQGHGTHVAGTIASYGSVSGVMQSATLIPVKVLDNSGSGSLYGITSGILYAADIDADVINMSLGGGGYNQSMDEAVQTAVAQGTIVVAATGNDGASSISYPAAYSSVIAVGSVDSNRVRSSFSNYGSGLELMAPGSNIYSTYPNGRYRSLSGTSMATPHVAGVAGLIRAANPDIVVAQARQILRDTAQEAGSFTQYGYGIVDAHAAVVAASGGSGG

SEQ ID NO: 1285 - DNA, 1239 bp, synthetic construct
  misc_feature 1..1239: note = Variant of serine peptidase from Bacillus sinesaloumensis
  source 1..1239: mol_type = other DNA
atggcagatcaagctagtcaagctaatggaaaccaggacgtcattgaaggcgagctgatcgtttcagtggaaccgaagaacggtaaacctgatgtgagcattcaaagtgcacaatccgtaacagggcaggaagacgtccttaaatcgaaaggctttacgatcgttgataccttgcatgtagaggatagcagcgtcaagccactcgtctcgaagaatttcaataagaaagtggtggagaagatgggactggtgtatcttgttcaatactctccggaccagtttaaaagttccaacattgcgaagaaagaactcagaaaagaattgatggatctgggctttaaagtccgctatataagcgaaaattacaagatgatggcgatcgaaggtacagccactcttcagggggtgcaccctaaccaagtttgggcgtataatatgattaaagctccggaagcgtgggctattacgtctggatccctgagcgttaaagtagcagtcctggatacagggatcgaccataatcacccatccttggccaacttcgtgaatactaatcttggccgctcgtttgttggaggaaacaccatggatgttcaaggtcatggcacacatgttgctggcacgattgcatcttatgggagtgtaagcggagtgatgcagagtgcgacactgatcccggtcaaagtgctcgataatattggcagcgggtccctttacggtattacgcagggcatattgtatgccgccgacatcgatgcggacgtcattaacatgtctctgggtggaggaggctataatcagagcatggatgaggctgttcaaacagcagttgctcagggaaccattgtagtagcagcgactggcaatgatggtgcatcgtcgatcagttatcctgctgcctacagcagcgtcattgcggtgggatctgtggactccaatcgtgttcgatcctcgttttctaactatggatctgggcttgaactgatggcaccgggcagcaacatctacagtacgtatcctaatggcagatatcgcagtttgagtggtacaagcatggctactccgcacgttgcgggcgtagctgggctcattcgcgcagccaacccagacatagtggtcgcgcaagcccgtcagattctgcgggataccgcgcaagaagcaggatcgttcacacagtacggctatggaatcgtcgatgctcatgccgccgttgttgctgcatccggtggtagcggcggc

SEQ ID NO: 1286 - protein, 413 aa, synthetic construct
  REGION 1..413: note = Variant of serine peptidase from Bacillus sinesaloumensis
MADQASQANGNQDVIEGELIVSVEPKNGKPDVSIQSAQSVTGQEDVLKSKGFTIVDTLHVEDSSVKPLVSKNFNKKVVEKMGLVYLVQYSPDQFKSSNIAKKELRKELMDLGFKVRYISENYKMMAIEGTATLQGVHPNQVWAYNMIKAPEAWAITSGSLSVKVAVLDTGIDHNHPSLANFVNTNLGRSFVGGNTMDVQGHGTHVAGTIASYGSVSGVMQSATLIPVKVLDNIGSGSLYGITQGILYAADIDADVINMSLGGGGYNQSMDEAVQTAVAQGTIVVAATGNDGASSISYPAAYSSVIAVGSVDSNRVRSSFSNYGSGLELMAPGSNIYSTYPNGRYRSLSGTSMATPHVAGVAGLIRAANPDIVVAQARQILRDTAQEAGSFTQYGYGIVDAHAAVVAASGGSGG

SEQ ID NO: 1287 - DNA, 1239 bp, synthetic construct
  misc_feature 1..1239: note = Variant of serine peptidase from Bacillus sinesaloumensis
  source 1..1239: mol_type = other DNA
atggcagatcaagctagtcaagctaatggaaaccaggacgtcattgaaggcgagctgatcgtttcagtggaaccgaagaacggtaaacctgatgtgagcattcaaagtgcacaatccgtaacagggcaggaagacgtccttaaatcgaaaggctttacgatcgttgataccttgcatgtagaggatagcagcgtcaagccactcgtctcgaagaatttcaataagaaagtggtggagaagatgggactggtgtatcttgttcaatactctccggaccagtttaaaagttccaacattgcgaagaaagaactcagaaaagaattgatggatctgggctttaaagtccgctatataagcgaaaattacaagatgatggcgatcgaaggtacagccactcttcagggggtgcaccctaaccaagtttgggcgtataatatgattaaagctccggaagcgtgggctattacgtctggatccctgagcgttaaagtagcagtcctggatacagggatcgaccataatcacccatccttggccaacttcgtgaatactaatcttggccgctcgtttgttggaggaaacaccatggatgttcaaggtcatggcacacatgttgctggcacgattgcatcttatgggagtgtaagcggagtgatgcagagtgcgacactgatcccggtcaaagtgctcgataattctggccaggggtccctttacggtattacgcagggcatattgtatgccgccgacatcgatgcggacgtcattaacatgtctctgggtggaggaggctataatcagagcatggatgaggctgttcaaacagcagttgctcagggaaccattgtagtagcagcgactggcaatgatggtgcatcgtcgatcagttatcctgctgcctacagcagcgtcattgcggtgggatctgtggactccaatcgtgttcgatcctcgttttctaactatggatctgggcttgaactgatggcaccgggcagcaacatctacagtacgtatcctaatggcagatatcgcagtttgagtggtacaagcatggctactccgcacgttgcgggcgtagctgggctcattcgcgcagccaacccagacatagtggtcgcgcaagcccgtcagattctgcgggataccgcgcaagaagcaggatcgttcacacagtacggctatggaatcgtcgatgctcatgccgccgttgttgctgcatccggtggtagcggcggc

SEQ ID NO: 1288 - protein, 413 aa, synthetic construct
  REGION 1..413: note = Variant of serine peptidase from Bacillus sinesaloumensis
MADQASQANGNQDVIEGELIVSVEPKNGKPDVSIQSAQSVTGQEDVLKSKGFTIVDTLHVEDSSVKPLVSKNFNKKVVEKMGLVYLVQYSPDQFKSSNIAKKELRKELMDLGFKVRYISENYKMMAIEGTATLQGVHPNQVWAYNMIKAPEAWAITSGSLSVKVAVLDTGIDHNHPSLANFVNTNLGRSFVGGNTMDVQGHGTHVAGTIASYGSVSGVMQSATLIPVKVLDNSGQGSLYGITQGILYAADIDADVINMSLGGGGYNQSMDEAVQTAVAQGTIVVAATGNDGASSISYPAAYSSVIAVGSVDSNRVRSSFSNYGSGLELMAPGSNIYSTYPNGRYRSLSGTSMATPHVAGVAGLIRAANPDIVVAQARQILRDTAQEAGSFTQYGYGIVDAHAAVVAASGGSGG

SEQ ID NO: 1289 - DNA, 1239 bp, synthetic construct
  misc_feature 1..1239: note = Variant of serine peptidase from Bacillus sinesaloumensis
  source 1..1239: mol_type = other DNA
atggcagatcaagctagtcaagctaatggaaaccaggacgtcattgaaggcgagctgatcgtttcagtggaaccgaagaacggtaaacctgatgtgagcattcaaagtgcacaatccgtaacagggcaggaagacgtccttaaatcgaaaggctttacgatcgttgataccttgcatgtagaggatagcagcgtcaagccactcgtctcgaagaatttcaataagaaagtggtggagaagatgggactggtgtatcttgttcaatactctccggaccagtttaaaagttccaacattgcgaagaaagaactcagaaaagaattgatggatctgggctttaaagtccgctatataagcgaaaattacaagatgatggcgatcgaaggtacagccactcttcagggggtgcaccctaaccaagtttgggcgtatgatatgattaaagctccggaagcgtgggctattacgtctggatccctgagcgttaaagtagcagtcctggatacagggatcgaccataatcacccatccttggccaacttcgtgaatactaatcttggccgctcgtttgttggaggaaacaccatggatgttcaaggtcatggcacacatgttgctggcacgattgcatcttatgggagtgtaagcggagtgatgcagagtgcgacactgatcccggtcaaagtgctcgataattctggcagcgggtccctttacggtattacgcagggcatattgtatgccgccgacatcgatgcggacgtcattaacatgtctctgggtggaggaggctataatcagagcatggatgaggctgttcaaacagcagttgctcagggaaccattgtagtagcagcgactggcaatgatggtgcatcgtcgatcagttatcctgctgcctacagcagcgtcattgcggtgggatctgtggactccaatcgtgttcgatcctcgttttctaactatggatctgggcttgaactgatggcaccgggcagcaacatctacagtacgtatcctaatggcagatatcgcagtttgagtggtacaagcatggctactccgcacgttgcgggcgtagctgggctcattcgcgcagccaacccagacatagtggtcgcgcaagcccgtcagattctgcgggataccgcgcaagaagcaggatcgttcacacagtacggctatggaatcgtcgatgctcatgccgccgttgttgctgcatccggtggtagcggcggc

SEQ ID NO: 1290 - protein, 413 aa, synthetic construct
  REGION 1..413: note = Variant of serine peptidase from Bacillus sinesaloumensis
MADQASQANGNQDVIEGELIVSVEPKNGKPDVSIQSAQSVTGQEDVLKSKGFTIVDTLHVEDSSVKPLVSKNFNKKVVEKMGLVYLVQYSPDQFKSSNIAKKELRKELMDLGFKVRYISENYKMMAIEGTATLQGVHPNQVWAYDMIKAPEAWAITSGSLSVKVAVLDTGIDHNHPSLANFVNTNLGRSFVGGNTMDVQGHGTHVAGTIASYGSVSGVMQSATLIPVKVLDNSGSGSLYGITQGILYAADIDADVINMSLGGGGYNQSMDEAVQTAVAQGTIVVAATGNDGASSISYPAAYSSVIAVGSVDSNRVRSSFSNYGSGLELMAPGSNIYSTYPNGRYRSLSGTSMATPHVAGVAGLIRAANPDIVVAQARQILRDTAQEAGSFTQYGYGIVDAHAAVVAASGGSGG

SEQ ID NO: 1291 - DNA, 1239 bp, synthetic construct
  misc_feature 1..1239: note = Variant of serine peptidase from Bacillus sinesaloumensis
  source 1..1239: mol_type = other DNA
atggcagatcaagctagtcaagctaatggaaaccaggacgtcattgaaggcgagctgatcgtttcagtggaaccgaagaacggtaaacctgatgtgagcattcaaagtgcacaatccgtaacagggcaggaagacgtccttaaatcgaaaggctttacgatcgttgataccttgcatgtagaggatagcagcgtcaagccactcgtctcgaagaatttcaataagaaagtggtggagaagatgggactggtgtatcttgttcaatactctccggaccagtttaaaagttccaacattgcgaagaaagaactcagaaaagaattgatggatctgggctttaaagtccgctatataagcgaaaattacaagatgatggcgatcgaaggtacagccactcttcagggggtgcaccctaaccaagtttgggcgtataatatgattaaagctccggaagcgtgggctattacgtctggatccctgagcgttaaagtagcagtcctggatacagggatcgaccataatcacccatccttggccaacttcgtgaatactaatcttggccgctcgtttgttggaggaaacaccatggatgttcaaggtcatggcacacatgttgctggcacgattgcatcttatgggagtgtaagcggagtgatgcagagtgcgacactgatcccggtcaaagtgctcgataattctggcagcgggtccctttacggtattacgcagggcatattgtatgccgccgacatcgatgcggacgtcattaacatgtctctgggtggaggaggctataatcagagcatggatgaggctgttgttacagcagttgctcagggaaccattgtagtagcagcgactggcaatgatggtgcatcgtcgatcagttatcctgctgcctacagcagcgtcattgcggtgggatctgtggactccaatcgtgttcgatcctcgttttctaactatggatctgggcttgaactgatggcaccgggcagcaacatctacagtacgtatcctaatggcagatatcgcagtttgagtggtacaagcatggctactccgcacgttgcgggcgtagctgggctcattcgcgcagccaacccagacatagtggtcgcgcaagcccgtcagattctgcgggataccgcgcaagaagcaggatcgttcacacagtacggctatggaatcgtcgatgctcatgccgccgttgttgctgcatccggtggtagcggcggc

SEQ ID NO: 1292 - protein, 413 aa, synthetic construct
  REGION 1..413: note = Variant of serine peptidase from Bacillus sinesaloumensis
MADQASQANGNQDVIEGELIVSVEPKNGKPDVSIQSAQSVTGQEDVLKSKGFTIVDTLHVEDSSVKPLVSKNFNKKVVEKMGLVYLVQYSPDQFKSSNIAKKELRKELMDLGFKVRYISENYKMMAIEGTATLQGVHPNQVWAYNMIKAPEAWAITSGSLSVKVAVLDTGIDHNHPSLANFVNTNLGRSFVGGNTMDVQGHGTHVAGTIASYGSVSGVMQSATLIPVKVLDNSGSGSLYGITQGILYAADIDADVINMSLGGGGYNQSMDEAVVTAVAQGTIVVAATGNDGASSISYPAAYSSVIAVGSVDSNRVRSSFSNYGSGLELMAPGSNIYSTYPNGRYRSLSGTSMATPHVAGVAGLIRAANPDIVVAQARQILRDTAQEAGSFTQYGYGIVDAHAAVVAASGGSGG

SEQ ID NO: 1293 - DNA, 1239 bp, synthetic construct
  misc_feature 1..1239: note = Variant of serine peptidase from Bacillus sinesaloumensis
  source 1..1239: mol_type = other DNA
atggcagatcaagctagtcaagctaatggaaaccaggacgtcattgaaggcgagctgatcgtttcagtggaaccgaagaacggtaaacctgatgtgagcattcaaagtgcacaatccgtaacagggcaggaagacgtccttaaatcgaaaggctttacgatcgttgataccttgcatgtagaggatagcagcgtcaagccactcgtctcgaagaatttcaataagaaagtggtggagaagatgggactggtgtatcttgttcaatactctccggaccagtttaaaagttccaacattgcgaagaaagaactcagaaaagaattgatggatctgggctttaaagtccgctatataagcgaaaattacaagatgatggcgatcgaaggtacagccactcttcagggggtgcaccctaaccaagtttgggcgtataatatgattaaagctccggaagcgtgggctattacgtctggatccctgagcgttaaagtagcagtcctggatacagggatcgaccataatcacccatccttggccaacttcgtgaatactaatcttggccgctcgtttgttggaggaaacaccatggatgttcaaggtcatggcacacatgttgctggcacgattgcatcttatgggagtgtaagcggagtgatgcagagtgcgacactgatcccggtcaaagtgctcgataattctggcagcgggtccctttacggtattacgcagggcatattgtatgccgccgacatcgatgcggacgtcattaacatgtctctgggtggaggaggctataatcagagcatggatgaggctgttcaaacagcagttgctatgggaaccattgtagtagcagcgactggcaatgatggtgcatcgtcgatcagttatcctgctgcctacagcagcgtcattgcggtgggatctgtggactccaatcgtgttcgatcctcgttttctaactatggatctgggcttgaactgatggcaccgggcagcaacatctacagtacgtatcctaatggcagatatcgcagtttgagtggtacaagcatggctactccgcacgttgcgggcgtagctgggctcattcgcgcagccaacccagacatagtggtcgcgcaagcccgtcagattctgcgggataccgcgcaagaagcaggatcgttcacacagtacggctatggaatcgtcgatgctcatgccgccgttgttgctgcatccggtggtagcggcggc

SEQ ID NO: 1294 - protein, 413 aa, synthetic construct
  REGION 1..413: note = Variant of serine peptidase from Bacillus sinesaloumensis
MADQASQANGNQDVIEGELIVSVEPKNGKPDVSIQSAQSVTGQEDVLKSKGFTIVDTLHVEDSSVKPLVSKNFNKKVVEKMGLVYLVQYSPDQFKSSNIAKKELRKELMDLGFKVRYISENYKMMAIEGTATLQGVHPNQVWAYNMIKAPEAWAITSGSLSVKVAVLDTGIDHNHPSLANFVNTNLGRSFVGGNTMDVQGHGTHVAGTIASYGSVSGVMQSATLIPVKVLDNSGSGSLYGITQGILYAADIDADVINMSLGGGGYNQSMDEAVQTAVAMGTIVVAATGNDGASSISYPAAYSSVIAVGSVDSNRVRSSFSNYGSGLELMAPGSNIYSTYPNGRYRSLSGTSMATPHVAGVAGLIRAANPDIVVAQARQILRDTAQEAGSFTQYGYGIVDAHAAVVAASGGSGG

SEQ ID NO: 1295 - DNA, 1239 bp, synthetic construct
  misc_feature 1..1239: note = Variant of serine peptidase from Bacillus sinesaloumensis
  source 1..1239: mol_type = other DNA
atggcagatcaagctagtcaagctaatggaaaccaggacgtcattgaaggcgagctgatcgtttcagtggaaccgaagaacggtaaacctgatgtgagcattcaaagtgcacaatccgtaacagggcaggaagacgtccttaaatcgaaaggctttacgatcgttgataccttgcatgtagaggatagcagcgtcaagccactcgtctcgaagaatttcaataagaaagtggtggagaagatgggactggtgtatcttgttcaatactctccggaccagtttaaaagttccaacattgcgaagaaagaactcagaaaagaattgatggatctgggctttaaagtccgctatataagcgaaaattacaagatgatggcgatcgaaggtacagccactcttcagggggtgcaccctaaccaagtttgggcgtataatatgattaaagctccggaagcgtgggctattacgtctggatccctgagcgttaaagtagcagtcctggatacagggatcgaccataatcacccatccttggccaacttcgtgaatactagtcttggccgctcgtttgttggaggaaacaccatggatgttcaaggtcatggcacacatgttgctggcacgattgcatcttatgggagtgtaagcggagtgatgcagagtgcgacactgatcccggtcaaagtgctcgataattctggcagcgggtccctttacggtattacgcagggcatattgtatgccgccgacatcgatgcggacgtcattaacatgtctctgggtggaggaggctataatcagagcatggatgaggctgttcaaacagcagttgctcagggaaccattgtagtagcagcgactggcaatgatggtgcatcgtcgatcagttatcctgctgcctacagcagcgtcattgcggtgggatctgtggactccaatcgtgttcgatcctcgttttctaactatggatctgggcttgaactgatggcaccgggcagcaacatctacagtacgtatcctaatggcagatatcgcagtttgagtggtacaagcatggctactccgcacgttgcgggcgtagctgggctcattcgcgcagccaacccagacatagtggtcgcgcaagcccgtcagattctgcgggataccgcgcaagaagcaggatcgttcacacagtacggctatggaatcgtcgatgctcatgccgccgttgttgctgcatccggtggtagcggcggc

SEQ ID NO: 1296 - protein, 413 aa, synthetic construct
  REGION 1..413: note = Variant of serine peptidase from Bacillus sinesaloumensis
MADQASQANGNQDVIEGELIVSVEPKNGKPDVSIQSAQSVTGQEDVLKSKGFTIVDTLHVEDSSVKPLVSKNFNKKVVEKMGLVYLVQYSPDQFKSSNIAKKELRKELMDLGFKVRYISENYKMMAIEGTATLQGVHPNQVWAYNMIKAPEAWAITSGSLSVKVAVLDTGIDHNHPSLANFVNTSLGRSFVGGNTMDVQGHGTHVAGTIASYGSVSGVMQSATLIPVKVLDNSGSGSLYGITQGILYAADIDADVINMSLGGGGYNQSMDEAVQTAVAQGTIVVAATGNDGASSISYPAAYSSVIAVGSVDSNRVRSSFSNYGSGLELMAPGSNIYSTYPNGRYRSLSGTSMATPHVAGVAGLIRAANPDIVVAQARQILRDTAQEAGSFTQYGYGIVDAHAAVVAASGGSGG

SEQ ID NO: 1297 - DNA, 1239 bp, synthetic construct
  misc_feature 1..1239: note = Variant of serine peptidase from Bacillus sinesaloumensis
  source 1..1239: mol_type = other DNA
atggcagatcaagctagtcaagctaatggaaaccaggacgtcattgaaggcgagctgatcgtttcagtggaaccgaagaacggtaaacctgatgtgagcattcaaagtgcacaatccgtaacagggcaggaagacgtccttaaatcgaaaggctttacgatcgttgataccttgcatgtagaggatagcagcgtcaagccactcgtctcgaagaatttcaataagaaagtggtggagaagatgggactggtgtatcttgttcaatactctccggaccagtttaaaagttccaacattgcgaagaaagaactcagaaaagaattgatggatctgggctttaaagtccgctatataagcgaaaattacaagatgatggcgatcgaaggtacagccactcttcagggggtgcaccctaaccaagtttgggcgtataatatgattaaagctccggaagcgtgggctattacgtctggatccctgagcgttaaagtagcagtcctggatacagggatcgaccataatcacccatccttggccaacttcgtgaatactaatcttggccgctcgtttgttggaggaaacaccatggatgttcaaggtcatggcacacatgttgctggcacgattgcatcttatgggagtgtaagcggagtgatgcagagtgcgacactgatcccggtcaaagtgctcgataattctggcagcgggtccctttacggtattacgcagggcatattgtatgccgccgacatcgatgcggacgtcattaacatgtctctgggtggaggaggctataatcagagcatggatgaggctgttcaaacagcagttgctaagggaaccattgtagtagcagcgactggcaatgatggtgcatcgtcgatcagttatcctgctgcctacagcagcgtcattgcggtgggatctgtggactccaatcgtgttcgatcctcgttttctaactatggatctgggcttgaactgatggcaccgggcagcaacatctacagtacgtatcctaatggcagatatcgcagtttgagtggtacaagcatggctactccgcacgttgcgggcgtagctgggctcattcgcgcagccaacccagacatagtggtcgcgcaagcccgtcagattctgcgggataccgcgcaagaagcaggatcgttcacacagtacggctatggaatcgtcgatgctcatgccgccgttgttgctgcatccggtggtagcggcggc

SEQ ID NO: 1298 - protein, 413 aa, synthetic construct
  REGION 1..413: note = Variant of serine peptidase from Bacillus sinesaloumensis
MADQASQANGNQDVIEGELIVSVEPKNGKPDVSIQSAQSVTGQEDVLKSKGFTIVDTLHVEDSSVKPLVSKNFNKKVVEKMGLVYLVQYSPDQFKSSNIAKKELRKELMDLGFKVRYISENYKMMAIEGTATLQGVHPNQVWAYNMIKAPEAWAITSGSLSVKVAVLDTGIDHNHPSLANFVNTNLGRSFVGGNTMDVQGHGTHVAGTIASYGSVSGVMQSATLIPVKVLDNSGSGSLYGITQGILYAADIDADVINMSLGGGGYNQSMDEAVQTAVAKGTIVVAATGNDGASSISYPAAYSSVIAVGSVDSNRVRSSFSNYGSGLELMAPGSNIYSTYPNGRYRSLSGTSMATPHVAGVAGLIRAANPDIVVAQARQILRDTAQEAGSFTQYGYGIVDAHAAVVAASGGSGG

SEQ ID NO: 1299 - DNA, 1239 bp, synthetic construct
  misc_feature 1..1239: note = Variant of serine peptidase from Bacillus sinesaloumensis
  source 1..1239: mol_type = other DNA
atggcagatcaagctagtcaagctaatggaaaccaggacgtcattgaaggcgagctgatcgtttcagtggaaccgaagaacggtaaacctgatgtgagcattcaaagtgcacaatccgtaacagggcaggaagacgtccttaaatcgaaaggctttacgatcgttgataccttgcatgtagaggatagcagcgtcaagccactcgtctcgaagaatttcaataagaaagtggtggagaagatgggactggtgtatcttgttcaatactctccggaccagtttaaaagttccaacattgcgaagaaagaactcagaaaagaattgatggatctgggctttaaagtccgctatataagcgaaaattacaagatgatggcgatcgaaggtacagccactcttcagggggtgcaccctaaccaagtttgggcgtattggatgattaaagctccggaagcgtgggctattacgtctggatccctgagcgttaaagtagcagtcctggatacagggatcgaccataatcacccatccttggccaacttcgtgaatactaatcttggccgctcgtttgttggaggaaacaccatggatgttcaaggtcatggcacacatgttgctggcacgattgcatcttatgggagtgtaagcggagtgatgcagagtgcgacactgatcccggtcaaagtgctcgataattctggcagcgggtccctttacggtattacgcagggcatattgtatgccgccgacatcgatgcggacgtcattaacatgtctctgggtggaggaggctataatcagagcatggatgaggctgttcaaacagcagttgctcagggaaccattgtagtagcagcgactggcaatgatggtgcatcgtcgatcagttatcctgctgcctacagcagcgtcattgcggtgggatctgtggactccaatcgtgttcgatcctcgttttctaactatggatctgggcttgaactgatggcaccgggcagcaacatctacagtacgtatcctaatggcagatatcgcagtttgagtggtacaagcatggctactccgcacgttgcgggcgtagctgggctcattcgcgcagccaacccagacatagtggtcgcgcaagcccgtcagattctgcgggataccgcgcaagaagcaggatcgttcacacagtacggctatggaatcgtcgatgctcatgccgccgttgttgctgcatccggtggtagcggcggc

SEQ ID NO: 1300 - protein, 413 aa, synthetic construct
  REGION 1..413: note = Variant of serine peptidase from Bacillus sinesaloumensis
MADQASQANGNQDVIEGELIVSVEPKNGKPDVSIQSAQSVTGQEDVLKSKGFTIVDTLHVEDSSVKPLVSKNFNKKVVEKMGLVYLVQYSPDQFKSSNIAKKELRKELMDLGFKVRYISENYKMMAIEGTATLQGVHPNQVWAYWMIKAPEAWAITSGSLSVKVAVLDTGIDHNHPSLANFVNTNLGRSFVGGNTMDVQGHGTHVAGTIASYGSVSGVMQSATLIPVKVLDNSGSGSLYGITQGILYAADIDADVINMSLGGGGYNQSMDEAVQTAVAQGTIVVAATGNDGASSISYPAAYSSVIAVGSVDSNRVRSSFSNYGSGLELMAPGSNIYSTYPNGRYRSLSGTSMATPHVAGVAGLIRAANPDIVVAQARQILRDTAQEAGSFTQYGYGIVDAHAAVVAASGGSGG

SEQ ID NO: 1301 - DNA, 1239 bp, synthetic construct
  misc_feature 1..1239: note = Variant of serine peptidase from Bacillus sinesaloumensis
  source 1..1239: mol_type = other DNA
atggcagatcaagctagtcaagctaatggaaaccaggacgtcattgaaggcgagctgatcgtttcagtggaaccgaagaacggtaaacctgatgtgagcattcaaagtgcacaatccgtaacagggcaggaagacgtccttaaatcgaaaggctttacgatcgttgataccttgcatgtagaggatagcagcgtcaagccactcgtctcgaagaatttcaataagaaagtggtggagaagatgggactggtgtatcttgttcaatactctccggaccagtttaaaagttccaacattgcgaagaaagaactcagaaaagaattgatggatctgggctttaaagtccgctatataagcgaaaattacaagatgatggcgatcgaaggtacagccactcttcagggggtgcaccctaaccaagtttgggcgtataatatgattaaagctccggaagcgtgggctattacgtctggatccctgagcgttaaagtagcagtcctggatacagggatcgaccataatcacccatccttggccaacttcgtgaatactaatcttggccgctcgtttgttggaggaaacaccatggatgttcaaggtcatggcacacatgttgctggcacgattgcatcttatgggagtgtaagcggagtgatgcagagtgcgacactgatcccggtcaaagtgctcgataattctggcagcgggtccctttacggtattacgcagggcatattgtatgccgccgacatcgatgcggacgtcattaacatgtctctgggtggaggaggctataatcagagcatggatgaggctgttcaaacagcagttgctcagggaaccattgtagtagcagcgactggcaatgagggtgcatcgtcgatcagttatcctgctgcctacagcagcgtcattgcggtgggatctgtggactccaatcgtgttcgatcctcgttttctaactatggatctgggcttgaactgatggcaccgggcagcaacatctacagtacgtatcctaatggcagatatcgcagtttgagtggtacaagcatggctactccgcacgttgcgggcgtagctgggctcattcgcgcagccaacccagacatagtggtcgcgcaagcccgtcagattctgcgggataccgcgcaagaagcaggatcgttcacacagtacggctatggaatcgtcgatgctcatgccgccgttgttgctgcatccggtggtagcggcggc

SEQ ID NO: 1302 - protein, 413 aa, synthetic construct
  REGION 1..413: note = Variant of serine peptidase from Bacillus sinesaloumensis
MADQASQANGNQDVIEGELIVSVEPKNGKPDVSIQSAQSVTGQEDVLKSKGFTIVDTLHVEDSSVKPLVSKNFNKKVVEKMGLVYLVQYSPDQFKSSNIAKKELRKELMDLGFKVRYISENYKMMAIEGTATLQGVHPNQVWAYNMIKAPEAWAITSGSLSVKVAVLDTGIDHNHPSLANFVNTNLGRSFVGGNTMDVQGHGTHVAGTIASYGSVSGVMQSATLIPVKVLDNSGSGSLYGITQGILYAADIDADVINMSLGGGGYNQSMDEAVQTAVAQGTIVVAATGNEGASSISYPAAYSSVIAVGSVDSNRVRSSFSNYGSGLELMAPGSNIYSTYPNGRYRSLSGTSMATPHVAGVAGLIRAANPDIVVAQARQILRDTAQEAGSFTQYGYGIVDAHAAVVAASGGSGG

SEQ ID NO: 1303 - DNA, 1239 bp, synthetic construct
  misc_feature 1..1239: note = Variant of serine peptidase from Bacillus sinesaloumensis
  source 1..1239: mol_type = other DNA
atggcagatcaagctagtcaagctaatggaaaccaggacgtcattgaaggcgagctgatcgtttcagtggaaccgaagaacggtaaacctgatgtgagcattcaaagtgcacaatccgtaacagggcaggaagacgtccttaaatcgaaaggctttacgatcgttgataccttgcatgtagaggatagcagcgtcaagccactcgtctcgaagaatttcaataagaaagtggtggagaagatgggactggtgtatcttgttcaatactctccggaccagtttaaaagttccaacattgcgaagaaagaactcagaaaagaattgatggatctgggctttaaagtccgctatataagcgaaaattacaagatgatggcgatcgaaggtacagccactcttcagggggtgcaccctaaccaagtttgggcgtataatatgattaaagctccggaagcgtgggctattacgtctggatccctgagcgttaaagtagcagtcctggatacagggatcgaccataatcacccatccttggccaacttcgtgaatactaatcttggccgctcgtttgttggaggaaacaccatggatgttcaaggtcatggcacacatgttgctggcacgattgcatcttatgggcctgtaagcggagtgatgcagagtgcgacactgatcccggtcaaagtgctcgataattctggcagcgggtccctttacggtattacgcagggcatattgtatgccgccgacatcgatgcggacgtcattaacatgtctctgggtggaggaggctataatcagagcatggatgaggctgttcaaacagcagttgctcagggaaccattgtagtagcagcgactggcaatgatggtgcatcgtcgatcagttatcctgctgcctacagcagcgtcattgcggtgggatctgtggactccaatcgtgttcgatcctcgttttctaactatggatctgggcttgaactgatggcaccgggcagcaacatctacagtacgtatcctaatggcagatatcgcagtttgagtggtacaagcatggctactccgcacgttgcgggcgtagctgggctcattcgcgcagccaacccagacatagtggtcgcgcaagcccgtcagattctgcgggataccgcgcaagaagcaggatcgttcacacagtacggctatggaatcgtcgatgctcatgccgccgttgttgctgcatccggtggtagcggcggc

SEQ ID NO: 1304 - protein, 413 aa, synthetic construct
  REGION 1..413: note = Variant of serine peptidase from Bacillus sinesaloumensis
MADQASQANGNQDVIEGELIVSVEPKNGKPDVSIQSAQSVTGQEDVLKSKGFTIVDTLHVEDSSVKPLVSKNFNKKVVEKMGLVYLVQYSPDQFKSSNIAKKELRKELMDLGFKVRYISENYKMMAIEGTATLQGVHPNQVWAYNMIKAPEAWAITSGSLSVKVAVLDTGIDHNHPSLANFVNTNLGRSFVGGNTMDVQGHGTHVAGTIASYGPVSGVMQSATLIPVKVLDNSGSGSLYGITQGILYAADIDADVINMSLGGGGYNQSMDEAVQTAVAQGTIVVAATGNDGASSISYPAAYSSVIAVGSVDSNRVRSSFSNYGSGLELMAPGSNIYSTYPNGRYRSLSGTSMATPHVAGVAGLIRAANPDIVVAQARQILRDTAQEAGSFTQYGYGIVDAHAAVVAASGGSGG

SEQ ID NO: 1305 - DNA, 1239 bp, synthetic construct
  misc_feature 1..1239: note = Variant of serine peptidase from Bacillus sinesaloumensis
  source 1..1239: mol_type = other DNA
atggcagatcaagctagtcaagctaatggaaaccaggacgtcattgaaggcgagctgatcgtttcagtggaaccgaagaacggtaaacctgatgtgagcattcaaagtgcacaatccgtaacagggcaggaagacgtccttaaatcgaaaggctttacgatcgttgataccttgcatgtagaggatagcagcgtcaagccactcgtctcgaagaatttcaataagaaagtggtggagaagatgggactggtgtatcttgttcaatactctccggaccagtttaaaagttccaacattgcgaagaaagaactcagaaaagaattgatggatctgggctttaaagtccgctatataagcgaaaattacaagatgatggcgatcgaaggtacagccactcttcagggggtgcaccctaaccaagtttgggcgtataatatgattaaagctccggaagcgtgggctattgtgtctggatccctgagcgttaaagtagcagtcctggatacagggatcgaccataatcacccatccttggccaacttcgtgaatactaatcttggccgctcgtttgttggaggaaacaccatggatgttcaaggtcatggcacacatgttgctggcacgattgcatcttatgggagtgtaagcggagtgatgcagagtgcgacactgatcccggtcaaagtgctcgataattctggcagcgggtccctttacggtattacgcagggcatattgtatgccgccgacatcgatgcggacgtcattaacatgtctctgggtggaggaggctataatcagagcatggatgaggctgttcaaacagcagttgctcagggaaccattgtagtagcagcgactggcaatgatggtgcatcgtcgatcagttatcctgctgcctacagcagcgtcattgcggtgggatctgtggactccaatcgtgttcgatcctcgttttctaactatggatctgggcttgaactgatggcaccgggcagcaacatctacagtacgtatcctaatggcagatatcgcagtttgagtggtacaagcatggctactccgcacgttgcgggcgtagctgggctcattcgcgcagccaacccagacatagtggtcgcgcaagcccgtcagattctgcgggataccgcgcaagaagcaggatcgttcacacagtacggctatggaatcgtcgatgctcatgccgccgttgttgctgcatccggtggtagcggcggc

SEQ ID NO: 1306 - protein, 413 aa, synthetic construct
  REGION 1..413: note = Variant of serine peptidase from Bacillus sinesaloumensis
MADQASQANGNQDVIEGELIVSVEPKNGKPDVSIQSAQSVTGQEDVLKSKGFTIVDTLHVEDSSVKPLVSKNFNKKVVEKMGLVYLVQYSPDQFKSSNIAKKELRKELMDLGFKVRYISENYKMMAIEGTATLQGVHPNQVWAYNMIKAPEAWAIVSGSLSVKVAVLDTGIDHNHPSLANFVNTNLGRSFVGGNTMDVQGHGTHVAGTIASYGSVSGVMQSATLIPVKVLDNSGSGSLYGITQGILYAADIDADVINMSLGGGGYNQSMDEAVQTAVAQGTIVVAATGNDGASSISYPAAYSSVIAVGSVDSNRVRSSFSNYGSGLELMAPGSNIYSTYPNGRYRSLSGTSMATPHVAGVAGLIRAANPDIVVAQARQILRDTAQEAGSFTQYGYGIVDAHAAVVAASGGSGG

SEQ ID NO: 1307 - DNA, 1239 bp, synthetic construct
  misc_feature 1..1239: note = Variant of serine peptidase from Bacillus sinesaloumensis
  source 1..1239: mol_type = other DNA
atggcagatcaagctagtcaagctaatggaaaccaggacgtcattgaaggcgagctgatcgtttcagtggaaccgaagaacggtaaacctgatgtgagcattcaaagtgcacaatccgtaacagggcaggaagacgtccttaaatcgaaaggctttacgatcgttgataccttgcatgtagaggatagcagcgtcaagccactcgtctcgaagaatttcaataagaaagtggtggagaagatgggactggtgtatcttgttcaatactctccggaccagtttaaaagttccaacattgcgaagaaagaactcagaaaagaattgatggatctgggctttaaagtccgctatataagcgaaaattacaagatgatggcgatcgaaggtacagccactcttcagggggtgcaccctaaccaagtttgggcgtataatatgattaaagctccggaagcgtgggctatttgttctggatccctgagcgttaaagtagcagtcctggatacagggatcgaccataatcacccatccttggccaacttcgtgaatactaatcttggccgctcgtttgttggaggaaacaccatggatgttcaaggtcatggcacacatgttgctggcacgattgcatcttatgggagtgtaagcggagtgatgcagagtgcgacactgatcccggtcaaagtgctcgataattctggcagcgggtccctttacggtattacgcagggcatattgtatgccgccgacatcgatgcggacgtcattaacatgtctctgggtggaggaggctataatcagagcatggatgaggctgttcaaacagcagttgctcagggaaccattgtagtagcagcgactggcaatgatggtgcatcgtcgatcagttatcctgctgcctacagcagcgtcattgcggtgggatctgtggactccaatcgtgttcgatcctcgttttctaactatggatctgggcttgaactgatggcaccgggcagcaacatctacagtacgtatcctaatggcagatatcgcagtttgagtggtacaagcatggctactccgcacgttgcgggcgtagctgggctcattcgcgcagccaacccagacatagtggtcgcgcaagcccgtcagattctgcgggataccgcgcaagaagcaggatcgttcacacagtacggctatggaatcgtcgatgctcatgccgccgttgttgctgcatccggtggtagcggcggc

SEQ ID NO: 1308 - protein, 413 aa, synthetic construct
  REGION 1..413: note = Variant of serine peptidase from Bacillus sinesaloumensis
MADQASQANGNQDVIEGELIVSVEPKNGKPDVSIQSAQSVTGQEDVLKSKGFTIVDTLHVEDSSVKPLVSKNFNKKVVEKMGLVYLVQYSPDQFKSSNIAKKELRKELMDLGFKVRYISENYKMMAIEGTATLQGVHPNQVWAYNMIKAPEAWAICSGSLSVKVAVLDTGIDHNHPSLANFVNTNLGRSFVGGNTMDVQGHGTHVAGTIASYGSVSGVMQSATLIPVKVLDNSGSGSLYGITQGILYAADIDADVINMSLGGGGYNQSMDEAVQTAVAQGTIVVAATGNDGASSISYPAAYSSVIAVGSVDSNRVRSSFSNYGSGLELMAPGSNIYSTYPNGRYRSLSGTSMATPHVAGVAGLIRAANPDIVVAQARQILRDTAQEAGSFTQYGYGIVDAHAAVVAASGGSGG

SEQ ID NO: 1309 - DNA, 1239 bp, synthetic construct
  misc_feature 1..1239: note = Variant of serine peptidase from Bacillus sinesaloumensis
  source 1..1239: mol_type = other DNA
atggcagatcaagctagtcaagctaatggaaaccaggacgtcattgaaggcgagctgatcgtttcagtggaaccgaagaacggtaaacctgatgtgagcattcaaagtgcacaatccgtaacagggcaggaagacgtccttaaatcgaaaggctttacgatcgttgataccttgcatgtagaggatagcagcgtcaagccactcgtctcgaagaatttcaataagaaagtggtggagaagatgggactggtgtatcttgttcaatactctccggaccagtttaaaagttccaacattgcgaagaaagaactcagaaaagaattgatggatctgggctttaaagtccgctatataagcgaaaattacaagatgatggcgatcgaaggtacagccactcttcagggggtgcaccctaaccaagtttgggcgtataatatgattaaagctccggaagcgtgggctattacgtctggatccctgagcgttaaagtagcagtcctggatacagggatcgaccataatcacccatccttggccaacttcgtgaatactaatcttggccgctcgtttgttggaggaaacaccatggatgttcaaggtcatggcacacatgttgctggcacgattgcatcttatgggagtgtaagcggagtgatgcagagtgcgtctctgatcccggtcaaagtgctcgataattctggcagcgggtccctttacggtattacgcagggcatattgtatgccgccgacatcgatgcggacgtcattaacatgtctctgggtggaggaggctataatcagagcatggatgaggctgttcaaacagcagttgctcagggaaccattgtagtagcagcgactggcaatgatggtgcatcgtcgatcagttatcctgctgcctacagcagcgtcattgcggtgggatctgtggactccaatcgtgttcgatcctcgttttctaactatggatctgggcttgaactgatggcaccgggcagcaacatctacagtacgtatcctaatggcagatatcgcagtttgagtggtacaagcatggctactccgcacgttgcgggcgtagctgggctcattcgcgcagccaacccagacatagtggtcgcgcaagcccgtcagattctgcgggataccgcgcaagaagcaggatcgttcacacagtacggctatggaatcgtcgatgctcatgccgccgttgttgctgcatccggtggtagcggcggc

SEQ ID NO: 1310 - protein, 413 aa, synthetic construct
  REGION 1..413: note = Variant of serine peptidase from Bacillus sinesaloumensis
MADQASQANGNQDVIEGELIVSVEPKNGKPDVSIQSAQSVTGQEDVLKSKGFTIVDTLHVEDSSVKPLVSKNFNKKVVEKMGLVYLVQYSPDQFKSSNIAKKELRKELMDLGFKVRYISENYKMMAIEGTATLQGVHPNQVWAYNMIKAPEAWAITSGSLSVKVAVLDTGIDHNHPSLANFVNTNLGRSFVGGNTMDVQGHGTHVAGTIASYGSVSGVMQSASLIPVKVLDNSGSGSLYGITQGILYAADIDADVINMSLGGGGYNQSMDEAVQTAVAQGTIVVAATGNDGASSISYPAAYSSVIAVGSVDSNRVRSSFSNYGSGLELMAPGSNIYSTYPNGRYRSLSGTSMATPHVAGVAGLIRAANPDIVVAQARQILRDTAQEAGSFTQYGYGIVDAHAAVVAASGGSGG

SEQ ID NO: 1311 - DNA, 1239 bp, synthetic construct
  misc_feature 1..1239: note = Variant of serine peptidase from Bacillus sinesaloumensis
  source 1..1239: mol_type = other DNA
atggcagatcaagctagtcaagctaatggaaaccaggacgtcattgaaggcgagctgatcgtttcagtggaaccgaagaacggtaaacctgatgtgagcattcaaagtgcacaatccgtaacagggcaggaagacgtccttaaatcgaaaggctttacgatcgttgataccttgcatgtagaggatagcagcgtcaagccactcgtctcgaagaatttcaataagaaagtggtggagaagatgggactggtgtatcttgttcaatactctccggaccagtttaaaagttccaacattgcgaagaaagaactcagaaaagaattgatggatctgggctttaaagtccgctatataagcgaaaattacaagatgatggcgatcgaaggtacagccactcttcagggggtgcaccctaaccaagtttgggcgtataatatgattaaagctccggaagcgtgggctattacgtctggatccctgagcgttaaagtagcagtcctggatacagggatcgaccataatcacccatccttggccaacttcgtgaatactaatcttggccgctcgtttgttggaggaaacaccatggatgttcaaggtcatggcacacatgttgctggcacgattgcatcttatgggagtgtaagcggagtgatgcagagtgcgacactgatcccggtcaaagtgctcgataattctggcagcgggtccctttacggtattacgcagggcatattgtatgccgccgacatcgatgcggacgtcattaacatgtctctgggtggaggaggctataatcagagcatggatgaggctgttcaaacagcagttgtgcagggaaccattgtagtagcagcgactggcaatgatggtgcatcgtcgatcagttatcctgctgcctacagcagcgtcattgcggtgggatctgtggactccaatcgtgttcgatcctcgttttctaactatggatctgggcttgaactgatggcaccgggcagcaacatctacagtacgtatcctaatggcagatatcgcagtttgagtggtacaagcatggctactccgcacgttgcgggcgtagctgggctcattcgcgcagccaacccagacatagtggtcgcgcaagcccgtcagattctgcgggataccgcgcaagaagcaggatcgttcacacagtacggctatggaatcgtcgatgctcatgccgccgttgttgctgcatccggtggtagcggcgac

SEQ ID NO: 1312 - protein, 413 aa, synthetic construct
  REGION 1..413: note = Variant of serine peptidase from Bacillus sinesaloumensis
MADQASQANGNQDVIEGELIVSVEPKNGKPDVSIQSAQSVTGQEDVLKSKGFTIVDTLHVEDSSVKPLVSKNFNKKVVEKMGLVYLVQYSPDQFKSSNIAKKELRKELMDLGFKVRYISENYKMMAIEGTATLQGVHPNQVWAYNMIKAPEAWAITSGSLSVKVAVLDTGIDHNHPSLANFVNTNLGRSFVGGNTMDVQGHGTHVAGTIASYGSVSGVMQSATLIPVKVLDNSGSGSLYGITQGILYAADIDADVINMSLGGGGYNQSMDEAVQTAVVQGTIVVAATGNDGASSISYPAAYSSVIAVGSVDSNRVRSSFSNYGSGLELMAPGSNIYSTYPNGRYRSLSGTSMATPHVAGVAGLIRAANPDIVVAQARQILRDTAQEAGSFTQYGYGIVDAHAAVVAASGGSGD

SEQ ID NO: 1313 - DNA, 1239 bp, synthetic construct
  misc_feature 1..1239: note = Variant of serine peptidase from Bacillus sinesaloumensis
  source 1..1239: mol_type = other DNA
atggcagatcaagctagtcaagctaatggaaaccaggacgtcattgaaggcgagctgatcgtttcagtggaaccgaagaacggtaaacctgatgtgagcattcaaagtgcacaatccgtaacagggcaggaagacgtccttaaatcgaaaggctttacgatcgttgataccttgcatgtagaggatagcagcgtcaagccactcgtctcgaagaatttcaataagaaagtggtggagaagatgggactggtgtatcttgttcaatactctccggaccagtttaaaagttccaacattgcgaagaaagaactcagaaaagaattgatggatctgggctttaaagtccgctatataagcgaaaattacaagatgatggcgatcgaaggtacagccactcttcagggggtgcaccctaaccaagtttgggcgtataatatgattaaagctccggaagcgtgggctattacgtctggatccctgagcgttaaagtagcagtcctggatacagggatcgaccataatcacccatccttggccaacttcgtgaatactaatcttggccgctcgtttgttggaggaaacaccatggatgttcaaggtcatggcacacatgttgctggcacgattgcatcttatgggagtgtaagcggagtgatgcagagtgcgacactgatcccggtcaaagtgctcgataattctggcagcgggtccctttacggtattacgcagggcatattgtatgccgcctgtatcgatgcggacgtcattaacatgtctctgggtggaggaggctataatcagagcatggatgaggctgttcaaacagcagttgctcagggaaccattgtagtagcagcgactggcaatgatggtgcatcgtcgatcagttatcctgctgcctacagcagcgtcattgcggtgggatctgtggactccaatcgtgttcgatcctcgttttctaactatggatctgggcttgaactgatggcaccgggcagcaacatctacagtacgtatcctaatggcagatatcgcagtttgagtggtacaagcatggctactccgcacgttgcgggcgtagctgggctcattcgcgcagccaacccagacatagtggtcgcgcaagcccgtcagattctgcgggataccgcgcaagaagcaggatcgttcacacagtacggctatggaatcgtcgatgctcatgccgccgttgttgctgcatccggtggtagcggcggc

SEQ ID NO: 1314 - protein, 413 aa, synthetic construct
  REGION 1..413: note = Variant of serine peptidase from Bacillus sinesaloumensis
MADQASQANGNQDVIEGELIVSVEPKNGKPDVSIQSAQSVTGQEDVLKSKGFTIVDTLHVEDSSVKPLVSKNFNKKVVEKMGLVYLVQYSPDQFKSSNIAKKELRKELMDLGFKVRYISENYKMMAIEGTATLQGVHPNQVWAYNMIKAPEAWAITSGSLSVKVAVLDTGIDHNHPSLANFVNTNLGRSFVGGNTMDVQGHGTHVAGTIASYGSVSGVMQSATLIPVKVLDNSGSGSLYGITQGILYAACIDADVINMSLGGGGYNQSMDEAVQTAVAQGTIVVAATGNDGASSISYPAAYSSVIAVGSVDSNRVRSSFSNYGSGLELMAPGSNIYSTYPNGRYRSLSGTSMATPHVAGVAGLIRAANPDIVVAQARQILRDTAQEAGSFTQYGYGIVDAHAAVVAASGGSGG

SEQ ID NO: 1315 - DNA, 1239 bp, synthetic construct
  misc_feature 1..1239: note = Variant of serine peptidase from Bacillus sinesaloumensis
  source 1..1239: mol_type = other DNA
atggcagatcaagctagtcaagctaatggaaaccaggacgtcattgaaggcgagctgatcgtttcagtggaaccgaagaacggtaaacctgatgtgagcattcaaagtgcacaatccgtaacagggcaggaagacgtccttaaatcgaaaggctttacgatcgttgataccttgcatgtagaggatagcagcgtcaagccactcgtctcgaagaatttcaataagaaagtggtggagaagatgggactggtgtatcttgttcaatactctccggaccagtttaaaagttccaacattgcgaagaaagaactcagaaaagaattgatggatctgggctttaaagtccgctatataagcgaaaattacaagatgatggcgatcgaaggtacagccactcttcagggggtgcaccctaaccaagtttgggcgtataatatgattaaagctccggaagcgtgggctattacgtctggatccctgagcgttaaagtagcagtcctggatacagggatcgaccataatcacccatccttggccaacttcgtgaatactaatcttggccgctcgtttgttggaggaaacaccatggatgttcaaggtcatggcacacatgttgctggcacgattgcatcttatgggagtgtaagcggagtgatgcagagtgcgacactgatcccggtcaaagtgctcgataattctggcagcgggtccctttacggtattacgcagggcatattgtatgccgccgacatcgatgcggacgtcattaacatgtctctgggtggaggaggctataattcgagcatggatgaggctgttcaaacagcagttgctcagggaaccattgtagtagcagcgactggcaatgatggtgcatcgtcgatcagttatcctgctgcctacagcagcgtcattgcggtgggatctgtggactccaatcgtgttcgatcctcgttttctaactatggatctgggcttgaactgatggcaccgggcagcaacatctacagtacgtatcctaatggcagatatcgcagtttgagtggtacaagcatggctactccgcacgttgcgggcgtagctgggctcattcgcgcagccaacccagacatagtggtcgcgcaagcccgtcagattctgcgggataccgcgcaagaagcaggatcgttcacacagtacggctatggaatcgtcgatgctcatgccgccgttgttgctgcatccggtggtagcggcggc

SEQ ID NO: 1316 - protein, 413 aa, synthetic construct
  REGION 1..413: note = Variant of serine peptidase from Bacillus sinesaloumensis
MADQASQANGNQDVIEGELIVSVEPKNGKPDVSIQSAQSVTGQEDVLKSKGFTIVDTLHVEDSSVKPLVSKNFNKKVVEKMGLVYLVQYSPDQFKSSNIAKKELRKELMDLGFKVRYISENYKMMAIEGTATLQGVHPNQVWAYNMIKAPEAWAITSGSLSVKVAVLDTGIDHNHPSLANFVNTNLGRSFVGGNTMDVQGHGTHVAGTIASYGSVSGVMQSATLIPVKVLDNSGSGSLYGITQGILYAADIDADVINMSLGGGGYNSSMDEAVQTAVAQGTIVVAATGNDGASSISYPAAYSSVIAVGSVDSNRVRSSFSNYGSGLELMAPGSNIYSTYPNGRYRSLSGTSMATPHVAGVAGLIRAANPDIVVAQARQILRDTAQEAGSFTQYGYGIVDAHAAVVAASGGSGG

SEQ ID NO: 1317 - DNA, 1239 bp, synthetic construct
  misc_feature 1..1239: note = Variant of serine peptidase from Bacillus sinesaloumensis
  source 1..1239: mol_type = other DNA
atggcagatcaagctagtcaagctaatggaaaccaggacgtcattgaaggcgagctgatcgtttcagtggaaccgaagaacggtaaacctgatgtgagcattcaaagtgcacaatccgtaacagggcaggaagacgtccttaaatcgaaaggctttacgatcgttgataccttgcatgtagaggatagcagcgtcaagccactcgtctcgaagaatttcaataagaaagtggtggagaagatgggactggtgtatcttgttcaatactctccggaccagtttaaaagttccaacattgcgaagaaagaactcagaaaagaattgatggatctgggctttaaagtccgctatataagcgaaaattacaagatgatggcgatcgaaggtacagccactcttcagggggtgcaccctaaccaagtttgggcgtataatatgattaaagctccggaagcgtgggctattacgtctggatccctgagcgttaaagtagcagtcctggatacagggatcgaccataatcacccatccttggccaacttcgtgaatactaatcttggccgctcgtttgttggaggaaacaccatggatgttcaaggtcatggcacacatgttgctggcacgattgcatcttatgggagtgtaagcggagtgatgcagagtgcgacactgatcccggtcaaagtgctcgataattctggcagcgggtccctttacggtattacgcagggcatattgtatgccgccgacatcgatgcggacgtcattaacatgtctctgggtggaggaggctataatcagagcatggatgaggctgttcaaacagcagttgctcagggaaccattgtagtagcagcgactggcaatgatggtgcatcgtcgatcagttttcctgctgcctacagcagcgtcattgcggtgggatctgtggactccaatcgtgttcgatcctcgttttctaactatggatctgggcttgaactgatggcaccgggcagcaacatctacagtacgtatcctaatggcagatatcgcagtttgagtggtacaagcatggctactccgcacgttgcgggcgtagctgggctcattcgcgcagccaacccagacatagtggtcgcgcaagcccgtcagattctgcgggataccgcgcaagaagcaggatcgttcacacagtacggctatggaatcgtcgatgctcatgccgccgttgttgctgcatccggtggtagcggcggc

SEQ ID NO: 1318 - protein, 413 aa, synthetic construct
  REGION 1..413: note = Variant of serine peptidase from Bacillus sinesaloumensis
MADQASQANGNQDVIEGELIVSVEPKNGKPDVSIQSAQSVTGQEDVLKSKGFTIVDTLHVEDSSVKPLVSKNFNKKVVEKMGLVYLVQYSPDQFKSSNIAKKELRKELMDLGFKVRYISENYKMMAIEGTATLQGVHPNQVWAYNMIKAPEAWAITSGSLSVKVAVLDTGIDHNHPSLANFVNTNLGRSFVGGNTMDVQGHGTHVAGTIASYGSVSGVMQSATLIPVKVLDNSGSGSLYGITQGILYAADIDADVINMSLGGGGYNQSMDEAVQTAVAQGTIVVAATGNDGASSISFPAAYSSVIAVGSVDSNRVRSSFSNYGSGLELMAPGSNIYSTYPNGRYRSLSGTSMATPHVAGVAGLIRAANPDIVVAQARQILRDTAQEAGSFTQYGYGIVDAHAAVVAASGGSGG

SEQ ID NO: 1319 - DNA, 1239 bp, synthetic construct
  misc_feature 1..1239: note = Variant of serine peptidase from Bacillus sinesaloumensis
  source 1..1239: mol_type = other DNA
atggcagatcaagctagtcaagctaatggaaaccaggacgtcattgaaggcgagctgatcgtttcagtggaaccgaagaacggtaaacctgatgtgagcattcaaagtgcacaatccgtaacagggcaggaagacgtccttaaatcgaaaggctttacgatcgttgataccttgcatgtagaggatagcagcgtcaagccactcgtctcgaagaatttcaataagaaagtggtggagaagatgggactggtgtatcttgttcaatactctccggaccagtttaaaagttccaacattgcgaagaaagaactcagaaaagaattgatggatctgggctttaaagtccgctatataagcgaaaattacaagatgatggcgatcgaaggtacagccactcttcagggggtgcaccctaaccaagtttgggcgtataatatgattaaagctccggaagcgtgggctattacgtctggatccctgagcgttaaagtagcagtcctggatacagggatcgaccataatcacccatccttggccaacttcgtgaatactaatcttggccgctcgtttgttggaggaaacaccatggatgttcaaggtcatggcacacatgttgctggcacgattgcatcttatgggagtgtaagcggagtgatgcagcaggcgacactgatcccggtcaaagtgctcgataattctggcagcgggtccctttacggtattacgcagggcatattgtatgccgccgacatcgatgcggacgtcattaacatgtctctgggtggaggaggctataatcagagcatggatgaggctgttcaaacagcagttgctcagggaaccattgtagtagcagcgactggcaatgatggtgcatcgtcgatcagttatcctgctgcctacagcagcgtcattgcggtgggatctgtggactccaatcgtgttcgatcctcgttttctaactatggatctgggcttgaactgatggcaccgggcagcaacatctacagtacgtatcctaatggcagatatcgcagtttgagtggtacaagcatggctactccgcacgttgcgggcgtagctgggctcattcgcgcagccaacccagacatagtggtcgcgcaagcccgtcagattctgcgggataccgcgcaagaagcaggatcgttcacacagtacggctatggaatcgtcgatgctcatgccgccgttgttgctgcatccggtggtagcggcggc

SEQ ID NO: 1320 - protein, 413 aa, synthetic construct
  REGION 1..413: note = Variant of serine peptidase from Bacillus sinesaloumensis
MADQASQANGNQDVIEGELIVSVEPKNGKPDVSIQSAQSVTGQEDVLKSKGFTIVDTLHVEDSSVKPLVSKNFNKKVVEKMGLVYLVQYSPDQFKSSNIAKKELRKELMDLGFKVRYISENYKMMAIEGTATLQGVHPNQVWAYNMIKAPEAWAITSGSLSVKVAVLDTGIDHNHPSLANFVNTNLGRSFVGGNTMDVQGHGTHVAGTIASYGSVSGVMQQATLIPVKVLDNSGSGSLYGITQGILYAADIDADVINMSLGGGGYNQSMDEAVQTAVAQGTIVVAATGNDGASSISYPAAYSSVIAVGSVDSNRVRSSFSNYGSGLELMAPGSNIYSTYPNGRYRSLSGTSMATPHVAGVAGLIRAANPDIVVAQARQILRDTAQEAGSFTQYGYGIVDAHAAVVAASGGSGG

SEQ ID NO: 1321 - DNA, 1239 bp, synthetic construct
  misc_feature 1..1239: note = Variant of serine peptidase from Bacillus sinesaloumensis
  source 1..1239: mol_type = other DNA
atggcagatcaagctagtcaagctaatggaaaccaggacgtcattgaaggcgagctgatcgtttcagtggaaccgaagaacggtaaacctgatgtgagcattcaaagtgcacaatccgtaacagggcaggaagacgtccttaaatcgaaaggctttacgatcgttgataccttgcatgtagaggatagcagcgtcaagccactcgtctcgaagaatttcaataagaaagtggtggagaagatgggactggtgtatcttgttcaatactctccggaccagtttaaaagttccaacattgcgaagaaagaactcagaaaagaattgatggatctgggctttaaagtccgctatataagcgaaaattacaagatgatggcgatcgaaggtacagccactcttcagggggtgcaccctaaccaagtttgggcgtataatatgattaaagctccggaagcgtgggctattacgtctggatccctgagcgttaaagtagcagtcctggatacagggatcgaccataatcacccatccttggccaacttcgtgaatactaatcttggccgctcgtttgttggaggagataccatggatgttcaaggtcatggcacacatgttgctggcacgattgcatcttatgggagtgtaagcggagtgatgcagagtgcgacactgatcccggtcaaagtgctcgataattctggcagcgggtccctttacggtattacgcagggcatattgtatgccgccgacatcgatgcggacgtcattaacatgtctctgggtggaggaggctataatcagagcatggatgaggctgttcaaacagcagttgctcagggaaccattgtagtagcagcgactggcaatgatggtgcatcgtcgatcagttatcctgctgcctacagcagcgtcattgcggtgggatctgtggactccaatcgtgttcgatcctcgttttctaactatggatctgggcttgaactgatggcaccgggcagcaacatctacagtacgtatcctaatggcagatatcgcagtttgagtggtacaagcatggctactccgcacgttgcgggcgtagctgggctcattcgcgcagccaacccagacatagtggtcgcgcaagcccgtcagattctgcgggataccgcgcaagaagcaggatcgttcacacagtacggctatggaatcgtcgatgctcatgccgccgttgttgctgcatccggtggtagcggcggc

SEQ ID NO: 1322 - protein, 413 aa, synthetic construct
  REGION 1..413: note = Variant of serine peptidase from Bacillus sinesaloumensis
MADQASQANGNQDVIEGELIVSVEPKNGKPDVSIQSAQSVTGQEDVLKSKGFTIVDTLHVEDSSVKPLVSKNFNKKVVEKMGLVYLVQYSPDQFKSSNIAKKELRKELMDLGFKVRYISENYKMMAIEGTATLQGVHPNQVWAYNMIKAPEAWAITSGSLSVKVAVLDTGIDHNHPSLANFVNTNLGRSFVGGDTMDVQGHGTHVAGTIASYGSVSGVMQSATLIPVKVLDNSGSGSLYGITQGILYAADIDADVINMSLGGGGYNQSMDEAVQTAVAQGTIVVAATGNDGASSISYPAAYSSVIAVGSVDSNRVRSSFSNYGSGLELMAPGSNIYSTYPNGRYRSLSGTSMATPHVAGVAGLIRAANPDIVVAQARQILRDTAQEAGSFTQYGYGIVDAHAAVVAASGGSGG

SEQ ID NO: 1323 - DNA, 1239 bp, synthetic construct
  misc_feature 1..1239: note = Variant of serine peptidase from Bacillus sinesaloumensis
  source 1..1239: mol_type = other DNA
atggcagatcaagctagtcaagctaatggaaaccaggacgtcattgaaggcgagctgatcgtttcagtggaaccgaagaacggtaaacctgatgtgagcattcaaagtgcacaatccgtaacagggcaggaagacgtccttaaatcgaaaggctttacgatcgttgataccttgcatgtagaggatagcagcgtcaagccactcgtctcgaagaatttcaataagaaagtggtggagaagatgggactggtgtatcttgttcaatactctccggaccagtttaaaagttccaacattgcgaagaaagaactcagaaaagaattgatggatctgggctttaaagtccgctatataagcgaaaattacaagatgatggcgatcgaaggtacagccactcttcagggggtgcaccctaaccaagtttgggcgtataatatgattaaagctccggaagcgtgggctattacgtctggatccctgagcgttaaagtagcagtcctggatacagggatcgaccataatcacccatccttggccaacttcgtgaatactaatcttggccgctcgtttgttggaggaaacaccatggatgttcaaggtcatggcacacatgttgctggcacgattgcatcttatgggagtgtaagcggagtgatgcagagtgcgacactgatcccggtcaaagtgctcgataattctggcagcgggtccctttacggtattacgcagggcatattgtatgccgccgacactgatgcggacgtcattaacatgtctctgggtggaggaggctataatcagagcatggatgaggctgttcaaacagcagttgctcagggaaccattgtagtagcagcgactggcaatgatggtgcatcgtcgatcagttatcctgctgcctacagcagcgtcattgcggtgggatctgtggactccaatcgtgttcgatcctcgttttctaactatggatctgggcttgaactgatggcaccgggcagcaacatctacagtacgtatcctaatggcagatatcgcagtttgagtggtacaagcatggctactccgcacgttgcgggcgtagctgggctcattcgcgcagccaacccagacatagtggtcgcgcaagcccgtcagattctgcgggataccgcgcaagaagcaggatcgttcacacagtacggctatggaatcgtcgatgctcatgccgccgttgttgctgcatccggtggtagcggcggc

SEQ ID NO: 1324 - protein, 413 aa, synthetic construct
  REGION 1..413: note = Variant of serine peptidase from Bacillus sinesaloumensis
MADQASQANGNQDVIEGELIVSVEPKNGKPDVSIQSAQSVTGQEDVLKSKGFTIVDTLHVEDSSVKPLVSKNFNKKVVEKMGLVYLVQYSPDQFKSSNIAKKELRKELMDLGFKVRYISENYKMMAIEGTATLQGVHPNQVWAYNMIKAPEAWAITSGSLSVKVAVLDTGIDHNHPSLANFVNTNLGRSFVGGNTMDVQGHGTHVAGTIASYGSVSGVMQSATLIPVKVLDNSGSGSLYGITQGILYAADTDADVINMSLGGGGYNQSMDEAVQTAVAQGTIVVAATGNDGASSISYPAAYSSVIAVGSVDSNRVRSSFSNYGSGLELMAPGSNIYSTYPNGRYRSLSGTSMATPHVAGVAGLIRAANPDIVVAQARQILRDTAQEAGSFTQYGYGIVDAHAAVVAASGGSGG

SEQ ID NO: 1325 - DNA, 1239 bp, synthetic construct
  misc_feature 1..1239: note = Variant of serine peptidase from Bacillus sinesaloumensis
  source 1..1239: mol_type = other DNA
atggcagatcaagctagtcaagctaatggaaaccaggacgtcattgaaggcgagctgatcgtttcagtggaaccgaagaacggtaaacctgatgtgagcattcaaagtgcacaatccgtaacagggcaggaagacgtccttaaatcgaaaggctttacgatcgttgataccttgcatgtagaggatagcagcgtcaagccactcgtctcgaagaatttcaataagaaagtggtggagaagatgggactggtgtatcttgttcaatactctccggaccagtttaaaagttccaacattgcgaagaaagaactcagaaaagaattgatggatctgggctttaaagtccgctatataagcgaaaattacaagatgatggcgatcgaaggtacagccactcttcagggggtgcaccctaaccaagtttgggcgtataatatgattaaagctccggaagcgtgggctattacgtctggatccctgagcgttaaagtagcagtcctggatacagggatcgaccataatcacccatccttggccaacttcgtgaatactaatcttggccgctcgtttgttggaggaaacaccatggatgttcaaggtcatggcacacatgttgctggcacgattgcatcttatgggagtgtaagcggagtgatgcagagtgcgacactgatcccggtcaaagtgctcgataattctggcagcgggtccctttacggtattacgcagggcatattgtatgccgccgacatcgatgtagacgtcattaacatgtctctgggtggaggaggctataatcagagcatggatgaggctgttcaaacagcagttgctcagggaaccattgtagtagcagcgactggcaatgatggtgcatcgtcgatcagttatcctgctgcctacagcagcgtcattgcggtgggatctgtggactccaatcgtgttcgatcctcgttttctaactatggatctgggcttgaactgatggcaccgggcagcaacatctacagtacgtatcctaatggcagatatcgcagtttgagtggtacaagcatggctactccgcacgttgcgggcgtagctgggctcattcgcgcagccaacccagacatagtggtcgcgcaagcccgtcagattctgcgggataccgcgcaagaagcaggatcgttcacacagtacggctatggaatcgtcgatgctcatgccgccgttgttgctgcatccggtggtacgggcggc

SEQ ID NO: 1326 - protein, 413 aa, synthetic construct
  REGION 1..413: note = Variant of serine peptidase from Bacillus sinesaloumensis
MADQASQANGNQDVIEGELIVSVEPKNGKPDVSIQSAQSVTGQEDVLKSKGFTIVDTLHVEDSSVKPLVSKNFNKKVVEKMGLVYLVQYSPDQFKSSNIAKKELRKELMDLGFKVRYISENYKMMAIEGTATLQGVHPNQVWAYNMIKAPEAWAITSGSLSVKVAVLDTGIDHNHPSLANFVNTNLGRSFVGGNTMDVQGHGTHVAGTIASYGSVSGVMQSATLIPVKVLDNSGSGSLYGITQGILYAADIDVDVINMSLGGGGYNQSMDEAVQTAVAQGTIVVAATGNDGASSISYPAAYSSVIAVGSVDSNRVRSSFSNYGSGLELMAPGSNIYSTYPNGRYRSLSGTSMATPHVAGVAGLIRAANPDIVVAQARQILRDTAQEAGSFTQYGYGIVDAHAAVVAASGGTGG

SEQ ID NO: 1327 - DNA, 1239 bp, synthetic construct
  misc_feature 1..1239: note = Variant of serine peptidase from Bacillus sinesaloumensis
  source 1..1239: mol_type = other DNA
atggcagatcaagctagtcaagctaatggaaaccaggacgtcattgaaggcgagctgatcgtttcagtggaaccgaagaacggtaaacctgatgtgagcattcaaagtgcacaatccgtaacagggcaggaagacgtccttaaatcgaaaggctttacgatcgttgataccttgcatgtagaggatagcagcgtcaagccactcgtctcgaagaatttcaataagaaagtggtggagaagatgggactggtgtatcttgttcaatactctccggaccagtttaaaagttccaacattgcgaagaaagaactcagaaaagaattgatggatctgggctttaaagtccgctatataagcgaaaattacaagatgatggcgatcgaaggtacagccactcttcagggggtgcaccctaaccaagtttgggcgtatccaatgattaaagctccggaagcgtgggctattacgcgcggatccctgagcgttaaagtagcagtcctggatacagggatcgaccataatcacccatccttggccaacttcgtgaatactaatcttggccgctcgtttgttggaggaaacaccatggatgttcaaggtcatggcacacatgttgctggcacgattgcatcttatgggagtgtaagcggagtgatgcagagtgcgacactgatcccggtcaaagtgctcgataattctggcagcgggtccctttacggtattacgcagggcatattgtatgccgccgacatcgatatcgacgtcattaacatgtctctgggtggaggaggctataatcagggcatggatgaggctactcaaacagcagttgctcagggagttattgtagtagcagcgactggcaatgatggtgcatcgtcgatcagttatcctgctgcctacagcagcgtcattgcggtgggatctgtggaccaaaatcgtgttcgatcctcgttttctaactatggatctgggcttgaactgatggcaccgggcagcaacatctacagtacgtatcctaatggcagatatcgcacgttgagtggtacaagcatggctactccgcacgttgcgggcgtagctgggctcattcgcgcagccaacccagacatagtggtcgcgcaagcccgtcagattctgcgggataccgcgcaagaagcaggatcgttcacacagtacggctatggaatcgtcgatgctcatgccgccgttgttgctgcatccggtggtacgggcggc

SEQ ID NO: 1328 - protein, 413 aa, synthetic construct
  REGION 1..413: note = Variant of serine peptidase from Bacillus sinesaloumensis
MADQASQANGNQDVIEGELIVSVEPKNGKPDVSIQSAQSVTGQEDVLKSKGFTIVDTLHVEDSSVKPLVSKNFNKKVVEKMGLVYLVQYSPDQFKSSNIAKKELRKELMDLGFKVRYISENYKMMAIEGTATLQGVHPNQVWAYPMIKAPEAWAITRGSLSVKVAVLDTGIDHNHPSLANFVNTNLGRSFVGGNTMDVQGHGTHVAGTIASYGSVSGVMQSATLIPVKVLDNSGSGSLYGITQGILYAADIDIDVINMSLGGGGYNQGMDEATQTAVAQGVIVVAATGNDGASSISYPAAYSSVIAVGSVDQNRVRSSFSNYGSGLELMAPGSNIYSTYPNGRYRTLSGTSMATPHVAGVAGLIRAANPDIVVAQARQILRDTAQEAGSFTQYGYGIVDAHAAVVAASGGTGG

SEQ ID NO: 1329 - DNA, 1239 bp, synthetic construct
  misc_feature 1..1239: note = Variant of serine peptidase from Bacillus sinesaloumensis
  source 1..1239: mol_type = other DNA
atggcagatcaagctagtcaagctaatggaaaccaggacgtcattgaaggcgagctgatcgtttcagtggaaccgaagaacggtaaacctgatgtgagcattcaaagtgcacaatccgtaacagggcaggaagacgtccttaaatcgaaaggctttacgatcgttgataccttgcatgtagaggatagcagcgtcaagccactcgtctcgaagaatttcaataagaaagtggtggagaagatgggactggtgtatcttgttcaatactctccggaccagtttaaaagttccaacattgcgaagaaagaactcagaaaagaattgatggatctgggctttaaagtccgctatataagcgaaaattacaagatgatggcgatcgaaggtacagccactcttcagggggtgcacccttgtcaagtttgggcgtataatatgattaaagctccggaagcgtgggctattacgagcggatccctgagcgttaaagtagcagtcctggatacagggatcgaccataatcacccatccttggccaacttcgtgaatactaatcttggccgctcgtttgttggaggaaacaccatggatgttcaaggtcatggcacacatgttgctggcacgattgcatcttatgggagtgtaagcggagtgatgcagagtgcgacactgatcccggtcaaagtgctcgataattctggcagcgggtccctttacggtattacgcagggcatattgtatgccgccgacatcgatgcagacgtcattaacatgtctctgggtggaggaggctataatcagagcatggatgaggctgttcaaacagcagttgctcagggaaccattgtagtagcagcgactggcaatgatggtgcatcgtcgatcagttatcctgctgcctacagcagcgtcattgcggtgggatctgtggactccaatcgtgttcgatcctcgttttctaactatggatctgggcttgaactgatggcaccgggcagcaacatctacagtacgtatcctaatggcagatatcgcgcgttgagtggtacaagcatggctactccgcacgttgcgggcgtagctgggctcattcgcgcagccaacccagacatagtggtcgcgcaagcccgtcagattctgcgggataccgcgcaagaagcaggatcgttcacacagtacggctatggaatcgtcgatgctcatgccgccgttgttgctgcatccggtggttcgggcggc

SEQ ID NO: 1330 - protein, 413 aa, synthetic construct
  REGION 1..413: note = Variant of serine peptidase from Bacillus sinesaloumensis
MADQASQANGNQDVIEGELIVSVEPKNGKPDVSIQSAQSVTGQEDVLKSKGFTIVDTLHVEDSSVKPLVSKNFNKKVVEKMGLVYLVQYSPDQFKSSNIAKKELRKELMDLGFKVRYISENYKMMAIEGTATLQGVHPCQVWAYNMIKAPEAWAITSGSLSVKVAVLDTGIDHNHPSLANFVNTNLGRSFVGGNTMDVQGHGTHVAGTIASYGSVSGVMQSATLIPVKVLDNSGSGSLYGITQGILYAADIDADVINMSLGGGGYNQSMDEAVQTAVAQGTIVVAATGNDGASSISYPAAYSSVIAVGSVDSNRVRSSFSNYGSGLELMAPGSNIYSTYPNGRYRALSGTSMATPHVAGVAGLIRAANPDIVVAQARQILRDTAQEAGSFTQYGYGIVDAHAAVVAASGGSGG

SEQ ID NO: 1331 - DNA, 1239 bp, synthetic construct
  misc_feature 1..1239: note = Variant of serine peptidase from Bacillus sinesaloumensis
  source 1..1239: mol_type = other DNA
atggcagatcaagctagtcaagctaatggaaaccaggacgtcattgaaggcgagctgatcgtttcagtggaaccgaagaacggtaaacctgatgtgagcattcaaagtgcacaatccgtaacagggcaggaagacgtccttaaatcgaaaggctttacgatcgttgataccttgcatgtagaggatagcagcgtcaagccactcgtctcgaagaatttcaataagaaagtggtggagaagatgggactggtgtatcttgttcaatactctccggaccagtttaaaagttccaacattgcgaagaaagaactcagaaaagaattgatggatctgggctttaaagtccgctatataagcgaaaattacaagatgatggcgatcgaaggtacagccactcttcagggggtgcaccctaaccaagtttgggcgtataatatgattaaagctccggaagcgtgggctattacgtctggatccctgagcgttaaagtagcagtcctggatacagggatcgaccataatcacccatccttggccaacttcgtgaatactaatcttggccgctcgtttgttggaggaaacaccatggatgttcaaggtcatggcacacatgttgctggcacgattgcatcttatgggagtgtaagcggagtgatgcagagtgcgacactgatcccggtcaaagtgctcgataattctggcagcgggtccctttacggtattacgcagggcatattgtatgccgccgacatcgatgtagacgtcattaacatgtctctgggtggaggaggctataatcagagcatggatgaggctgttcaaacagcagttgctcagggaaccattgtagtagcagcgactggcaatgatggtgcatcgtcgatcagttatcctgctgcctacagcagcgtcattgcggtgggatctgtggactccaatcgtgttcgatcctcgttttctaactatggatctgggcttgaactgatggcaccgggcagcaacatctacagtacgtatcctaatggcagatatcgcagtttgagtggtacaagcatggctactccgcacgttgcgggcgtagctgggctcattcgcgcagccaacccagacatagtggtcgcgcaagcccgtcagattctgcgggataccgcgcaagaagcaggatcgttcacacagtacggctatggaatcgtcgatgctcatgccgccgttgttgctgcatccggtggttcgggcggc

SEQ ID NO: 1332 - protein, 413 aa, synthetic construct
  REGION 1..413: note = Variant of serine peptidase from Bacillus sinesaloumensis
MADQASQANGNQDVIEGELIVSVEPKNGKPDVSIQSAQSVTGQEDVLKSKGFTIVDTLHVEDSSVKPLVSKNFNKKVVEKMGLVYLVQYSPDQFKSSNIAKKELRKELMDLGFKVRYISENYKMMAIEGTATLQGVHPNQVWAYNMIKAPEAWAITSGSLSVKVAVLDTGIDHNHPSLANFVNTNLGRSFVGGNTMDVQGHGTHVAGTIASYGSVSGVMQSATLIPVKVLDNSGSGSLYGITQGILYAADIDVDVINMSLGGGGYNQSMDEAVQTAVAQGTIVVAATGNDGASSISYPAAYSSVIAVGSVDSNRVRSSFSNYGSGLELMAPGSNIYSTYPNGRYRSLSGTSMATPHVAGVAGLIRAANPDIVVAQARQILRDTAQEAGSFTQYGYGIVDAHAAVVAASGGSGG

SEQ ID NO: 1333 - DNA, 1239 bp, synthetic construct
  misc_feature 1..1239: note = Variant of serine peptidase from Bacillus sinesaloumensis
  source 1..1239: mol_type = other DNA
atggcagatcaagctagtcaagctaatggaaaccaggacgtcattgaaggcgagctgatcgtttcagtggaaccgaagaacggtaaacctgatgtgagcattcaaagtgcacaatccgtaacagggcaggaagacgtccttaaatcgaaaggctttacgatcgttgataccttgcatgtagaggatagcagcgtcaagccactcgtctcgaagaatttcaataagaaagtggtggagaagatgggactggtgtatcttgttcaatactctccggaccagtttaaaagttccaacattgcgaagaaagaactcagaaaagaattgatggatctgggctttaaagtccgctatataagcgaaaattacaagatgatggcgatcgaaggtacagccactcttcagggggtgcaccctaaccaagtttgggcgtataatatgattaaagctccggaagcgtgggctattacgtctggatccctgagcgttaaagtagcagtcctggatacagggatcgaccataatcacccatccttggccaacttcgtgaatactaatcttggccgctcgtttgttggaggaaacaccatggatgttcaaggtcatggcacacatgttgctggcacgattgcatcttatgggagtgtaagcggagtgatgcagagtgcgacactgatcccggtcaaagtgctcgataattctggcagcgggtccctttacggtattacgcagggcatattgtatgccgccgacatcgatgcagacgtcattaacatgtctctgggtggaggaggctataatcagagcatggatgaggctgttcaaacagcagttgctcagggaaccattgtagtagcagcgactggcaatgatggtgcatcgtcgatcagttatcctgctgcctacagcagcgtcattgcggtgggatctgtggactccaatcgtgttcgatcctcgttttctaactatggatctgggcttgaactgatggcaccgggcagcaacatctacagtacgtatcctaatggcagatatcgcacgttgagtggtacaagcatggctactccgcacgttgcgggcgtagctgggctcattcgcgcagccaacccagacatagtggtcgcgcaagcccgtcagattctgcgggataccgcgcaagaagcaggatcgttcacacagtacggctatggaatcgtcgatgctcatgccgccgttgttgctgcatccggtggtacgggcggc

SEQ ID NO: 1334 - protein, 413 aa, synthetic construct
  REGION 1..413: note = Variant of serine peptidase from Bacillus sinesaloumensis
MADQASQANGNQDVIEGELIVSVEPKNGKPDVSIQSAQSVTGQEDVLKSKGFTIVDTLHVEDSSVKPLVSKNFNKKVVEKMGLVYLVQYSPDQFKSSNIAKKELRKELMDLGFKVRYISENYKMMAIEGTATLQGVHPNQVWAYNMIKAPEAWAITSGSLSVKVAVLDTGIDHNHPSLANFVNTNLGRSFVGGNTMDVQGHGTHVAGTIASYGSVSGVMQSATLIPVKVLDNSGSGSLYGITQGILYAADIDADVINMSLGGGGYNQSMDEAVQTAVAQGTIVVAATGNDGASSISYPAAYSSVIAVGSVDSNRVRSSFSNYGSGLELMAPGSNIYSTYPNGRYRTLSGTSMATPHVAGVAGLIRAANPDIVVAQARQILRDTAQEAGSFTQYGYGIVDAHAAVVAASGGTGG

SEQ ID NO: 1335 - DNA, 1239 bp, synthetic construct
  misc_feature 1..1239: note = Variant of serine peptidase from Bacillus sinesaloumensis
  source 1..1239: mol_type = other DNA
atggcagatcaagctagtcaagctaatggaaaccaggacgtcattgaaggcgagctgatcgtttcagtggaaccgaagaacggtaaacctgatgtgagcattcaaagtgcacaatccgtaacagggcaggaagacgtccttaaatcgaaaggctttacgatcgttgataccttgcatgtagaggatagcagcgtcaagccactcgtctcgaagaatttcaataagaaagtggtggagaagatgggactggtgtatcttgttcaatactctccggaccagtttaaaagttccaacattgcgaagaaagaactcagaaaagaattgatggatctgggctttaaagtccgctatataagcgaaaattacaagatgatggcgatcgaaggtacagccactcttcagggggtgcaccctaaccaagtttgggcgtataatatgattaaagctccggaagcgtgggctattacgtctggatccctgagcgttaaagtagcagtcctggatacagggatcgaccataatcacccatccttggccaacttcgtgaatactaatcttggccgctcgtttgttggaggaaacaccatggatgttcaaggtcatggcacacatgttgctggcacgattgcatcttatgggagtgtaagcggagtgatgcagagtgcgacactgatcccggtcaaagtgctcgataattctggcagcgggtccctttacggtattacgcagggcatattgtatgccgccgacatcgatgtagacgtcattaacatgtctctgggtggaggaggctataatcagagcatggatgaggctgttcaaacagcagttgctcagggaaccattgtagtagcagcgactggcaatgatggtgcatcgtcgatcagttatcctgctgcctacagcagcgtcattgcggtgggatctgtggactccaatcgtgttcgatcctcgttttctaactatggatctgggcttgaactgatggcaccgggcagcaacatctacagtacgtatcctaatggcagatatcgcacgttgagtggtacaagcatggctactccgcacgttgcgggcgtagctgggctcattcgcgcagccaacccagacatagtggtcgcgcaagcccgtcagattctgcgggataccgcgcaagaagcaggatcgttcacacagtacggctatggaatcgtcgatgctcatgccgccgttgttgctgcatccggtggttcgggcggc

SEQ ID NO: 1336 - protein, 413 aa, synthetic construct
  REGION 1..413: note = Variant of serine peptidase from Bacillus sinesaloumensis
MADQASQANGNQDVIEGELIVSVEPKNGKPDVSIQSAQSVTGQEDVLKSKGFTIVDTLHVEDSSVKPLVSKNFNKKVVEKMGLVYLVQYSPDQFKSSNIAKKELRKELMDLGFKVRYISENYKMMAIEGTATLQGVHPNQVWAYNMIKAPEAWAITSGSLSVKVAVLDTGIDHNHPSLANFVNTNLGRSFVGGNTMDVQGHGTHVAGTIASYGSVSGVMQSATLIPVKVLDNSGSGSLYGITQGILYAADIDVDVINMSLGGGGYNQSMDEAVQTAVAQGTIVVAATGNDGASSISYPAAYSSVIAVGSVDSNRVRSSFSNYGSGLELMAPGSNIYSTYPNGRYRTLSGTSMATPHVAGVAGLIRAANPDIVVAQARQILRDTAQEAGSFTQYGYGIVDAHAAVVAASGGSGG

SEQ ID NO: 1337 - DNA, 1239 bp, synthetic construct
  misc_feature 1..1239: note = Variant of serine peptidase from Bacillus sinesaloumensis
  source 1..1239: mol_type = other DNA
atggcagatcaagctagtcaagctaatggaaaccaggacgtcattgaaggcgagctgatcgtttcagtggaaccgaagaacggtaaacctgatgtgagcattcaaagtgcacaatccgtaacagggcaggaagacgtccttaaatcgaaaggctttacgatcgttgataccttgcatgtagaggatagcagcgtcaagccactcgtctcgaagaatttcaataagaaagtggtggagaagatgggactggtgtatcttgttcaatactctccggaccagtttaaaagttccaacattgcgaagaaagaactcagaaaagaattgatggatctgggctttaaagtccgctatataagcgaaaattacaagatgatggcgatcgaaggtacagccactcttcagggggtgcacccttgtcaagtttgggcgtataatatgattaaagctccggaagcgtgggctattacgagcggatccctgagcgttaaagtagcagtcctggatacagggatcgaccataatcacccatccttggccaacttcgtgaatactaatcttggccgctcgtttgttggaggaaacaccatggatgttcaaggtcatggcacacatgttgctggcacgattgcatcttatgggagtgtaagcggagtgatgcagagtgcgacactgatcccggtcaaagtgctcgataattctggcagcgggtccctttacggtattacgcagggcatattgtatgccgccgacatcgatgcagacgtcattaacatgtctctgggtggaggaggctataatcagagcatggatgaggctgtccaaacagcagttgctcagggaaccattgtagtagcagcgactggcaatgatggtgcatcgtcgatcagttatcctgctgcctacagcagcgtcattgcggtgggatctgtggactccaatcgtgttcgatcctcgttttctaactatggatctgggcttgaactgatggcaccgggcagcaacatctacagtacgtatcctaatggcagatatcgcacgttgagtggtacaagcatggctactccgcacgttgcgggcgtagctgggctcattcgcgcagccaacccagacatagtggtcgcgcaagcccgtcagattctgcgggataccgcgcaagaagcaggatcgttcacacagtacggctatggaatcgtcgatgctcatgccgccgttgttgctgcatccggtggttcgggcggc

SEQ ID NO: 1338 - protein, 413 aa, synthetic construct
  REGION 1..413: note = Variant of serine peptidase from Bacillus sinesaloumensis
MADQASQANGNQDVIEGELIVSVEPKNGKPDVSIQSAQSVTGQEDVLKSKGFTIVDTLHVEDSSVKPLVSKNFNKKVVEKMGLVYLVQYSPDQFKSSNIAKKELRKELMDLGFKVRYISENYKMMAIEGTATLQGVHPCQVWAYNMIKAPEAWAITSGSLSVKVAVLDTGIDHNHPSLANFVNTNLGRSFVGGNTMDVQGHGTHVAGTIASYGSVSGVMQSATLIPVKVLDNSGSGSLYGITQGILYAADIDADVINMSLGGGGYNQSMDEAVQTAVAQGTIVVAATGNDGASSISYPAAYSSVIAVGSVDSNRVRSSFSNYGSGLELMAPGSNIYSTYPNGRYRTLSGTSMATPHVAGVAGLIRAANPDIVVAQARQILRDTAQEAGSFTQYGYGIVDAHAAVVAASGGSGG

SEQ ID NO: 1339 - DNA, 1239 bp, synthetic construct
  misc_feature 1..1239: note = Variant of serine peptidase from Bacillus sinesaloumensis
  source 1..1239: mol_type = other DNA
atggcagatcaagctagtcaagctaatggaaaccaggacgtcattgaaggcgagctgatcgtttcagtggaaccgaagaacggtaaacctgatgtgagcattcaaagtgcacaatccgtaacagggcaggaagacgtccttaaatcgaaaggctttacgatcgttgataccttgcatgtagaggatagcagcgtcaagccactcgtctcgaagaatttcaataagaaagtggtggagaagatgggactggtgtatcttgttcaatactctccggaccagtttaaaagttccaacattgcgaagaaagaactcagaaaagaattgatggatctgggctttaaagtccgctatataagcgaaaattacaagatgatggcgatcgaaggtacagccactcttcagggggtgcaccctaaccaagtttgggcgtataatatgattaaagctccggaagcgtgggctattacgtctggatccctgagcgttaaagtagcagtcctggatacagggatcgaccataatcacccatccttggccaacttcgtgaatactaatcttggccgctcgtttgttggaggaaacaccatggatgttcaaggtcatggcacacatgttgctggcacgattgcatcttatgggagtgtaagcggagtgatgcagagtgcgacactgatcccggtcaaagtgctcgataattctggcagcgggtccctttacggtattacgcagggcatattgtatgccgccgacatcgatgcagacgtcattaacatgtctctgggtggaggaggctataatcagagcatggatgaggctgttcaaacagcagttgctcagggaaccattgtagtagcagcgactggcaatgatggtgcatcgtcgatcagttatcctgctgcctacagcagcgtcattgcggtgggatctgtggaccaaaatcgtgttcgatcctcgttttctaactatggatctgggcttgaactgatggcaccgggcagcaacatctacagtacgtatcctaatggcagatatcgcacgttgagtggtacaagcatggctactccgcacgttgcgggcgtagctgggctcattcgcgcagccaacccagacatagtggtcgcgcaagcccgtcagattctgcgggataccgcgcaagaagcaggatcgttcacacagtacggctatggaatcgtcgatgctcatgccgccgttgttgctgcatccggtggttcgggcggc

SEQ ID NO: 1340 - protein, 413 aa, synthetic construct
  REGION 1..413: note = Variant of serine peptidase from Bacillus sinesaloumensis
MADQASQANGNQDVIEGELIVSVEPKNGKPDVSIQSAQSVTGQEDVLKSKGFTIVDTLHVEDSSVKPLVSKNFNKKVVEKMGLVYLVQYSPDQFKSSNIAKKELRKELMDLGFKVRYISENYKMMAIEGTATLQGVHPNQVWAYNMIKAPEAWAITSGSLSVKVAVLDTGIDHNHPSLANFVNTNLGRSFVGGNTMDVQGHGTHVAGTIASYGSVSGVMQSATLIPVKVLDNSGSGSLYGITQGILYAADIDADVINMSLGGGGYNQSMDEAVQTAVAQGTIVVAATGNDGASSISYPAAYSSVIAVGSVDQNRVRSSFSNYGSGLELMAPGSNIYSTYPNGRYRTLSGTSMATPHVAGVAGLIRAANPDIVVAQARQILRDTAQEAGSFTQYGYGIVDAHAAVVAASGGSGG

SEQ ID NO: 1341 - DNA, 1239 bp, synthetic construct
  misc_feature 1..1239: note = Variant of serine peptidase from Bacillus sinesaloumensis
  source 1..1239: mol_type = other DNA
atggcagatcaagctagtcaagctaatggaaaccaggacgtcattgaaggcgagctgatcgtttcagtggaaccgaagaacggtaaacctgatgtgagcattcaaagtgcacaatccgtaacagggcaggaagacgtccttaaatcgaaaggctttacgatcgttgataccttgcatgtagaggatagcagcgtcaagccactcgtctcgaagaatttcaataagaaagtggtggagaagatgggactggtgtatcttgttcaatactctccggaccagtttaaaagttccaacattgcgaagaaagaactcagaaaagaattgatggatctgggctttaaagtccgctatataagcgaaaattacaagatgatggcgatcgaaggtacagccactcttcagggggtgcaccctaaccaagtttgggcgtataatatgattaaagctccggaagcgtgggctattacgtctggatccctgagcgttaaagtagcagtcctggatacagggatcgaccataatcacccatccttggccaacttcgtgaatactaatcttggccgctcgtttgttggaggaaacaccatggatgttcaaggtcatggcacacatgttgctggcacgattgcatcttatgggagtgtaagcggagtgatgcagagtgcgacactgatcccggtcaaagtgctcgataattctggcagcgggtccctttacggtattacgcagggcatattgtatgccgccgacatcgatgcagacgtcattaacatgtctctgggtggaggaggctataatcagagcatggatgaggctactcaaacagcagttgctcagggaaccattgtagtagcagcgactggcaatgatggtgcatcgtcgatcagttatcctgctgcctacagcagcgtcattgcggtgggatctgtggaccaaaatcgtgttcgatcctcgttttctaactatggatctgggcttgaactgatggcaccgggcagcaacatctacagtacgtatcctaatggcagatatcgctcgttgagtggtacaagcatggctactccgcacgttgcgggcgtagctgggctcattcgcgcagccaacccagacatagtggtcgcgcaagcccgtcagattctgcgggataccgcgcaagaagcaggatcgttcacacagtacggctatggaatcgtcgatgctcatgccgccgttgttgctgcatccggtggttcgggcggc

SEQ ID NO: 1342 - protein, 413 aa, synthetic construct
  REGION 1..413: note = Variant of serine peptidase from Bacillus sinesaloumensis
MADQASQANGNQDVIEGELIVSVEPKNGKPDVSIQSAQSVTGQEDVLKSKGFTIVDTLHVEDSSVKPLVSKNFNKKVVEKMGLVYLVQYSPDQFKSSNIAKKELRKELMDLGFKVRYISENYKMMAIEGTATLQGVHPNQVWAYNMIKAPEAWAITSGSLSVKVAVLDTGIDHNHPSLANFVNTNLGRSFVGGNTMDVQGHGTHVAGTIASYGSVSGVMQSATLIPVKVLDNSGSGSLYGITQGILYAADIDADVINMSLGGGGYNQSMDEATQTAVAQGTIVVAATGNDGASSISYPAAYSSVIAVGSVDQNRVRSSFSNYGSGLELMAPGSNIYSTYPNGRYRSLSGTSMATPHVAGVAGLIRAANPDIVVAQARQILRDTAQEAGSFTQYGYGIVDAHAAVVAASGGSGG

SEQ ID NO: 1343 - DNA, 1239 bp, synthetic construct
  misc_feature 1..1239: note = Variant of serine peptidase from Bacillus sinesaloumensis
  source 1..1239: mol_type = other DNA
atggcagatcaagctagtcaagctaatggaaaccaggacgtcattgaaggcgagctgatcgtttcagtggaaccgaagaacggtaaacctgatgtgagcattcaaagtgcacaatccgtaacagggcaggaagacgtccttaaatcgaaaggctttacgatcgttgataccttgcatgtagaggatagcagcgtcaagccactcgtctcgaagaatttcaataagaaagtggtggagaagatgggactggtgtatcttgttcaatactctccggaccagtttaaaagttccaacattgcgaagaaagaactcagaaaagaattgatggatctgggctttaaagtccgctatataagcgaaaattacaagatgatggcgatcgaaggtacagccactcttcagggggtgcaccctaaccaagtttgggcgtataatatgattaaagctccggaagcgtgggctattacgtctggatccctgagcgttaaagtagcagtcctggatacagggatcgaccataatcacccatccttggccaacttcgtgaatactaatcttggccgctcgtttgttggaggaaacaccatggatgttcaaggtcatggcacacatgttgctggcacgattgcatcttatgggagtgtaagcggagtgatgcagagtgcgacactgatcccggtcaaagtgctcgataattctggcagcgggtccctttacggtattacgcagggcatattgtatgccgccgacatcgatatcgacgtcattaacatgtctctgggtggaggaggctataatcagagcatggatgaggctgtccaaacagcagttgctcagggagttattgtagtagcagcgactggcaatgatggtgcatcgtcgatcagttatcctgctgcctacagcagcgtcattgcggtgggatctgtggactccaatcgtgttcgatcctcgttttctaactatggatctgggcttgaactgatggcaccgggcagcaacatctacagtacgtatcctaatggcagatatcgcagtttgagtggtacaagcatggctactccgcacgttgcgggcgtagctgggctcattcgcgcagccaacccagacatagtggtcgcgcaagcccgtcagattctgcgggataccgcgcaagaagcaggatcgttcacacagtacggctatggaatcgtcgatgctcatgccgccgttgttgctgcatccggtggttcgggcggc

SEQ ID NO: 1344 - protein, 413 aa, synthetic construct
  REGION 1..413: note = Variant of serine peptidase from Bacillus sinesaloumensis
MADQASQANGNQDVIEGELIVSVEPKNGKPDVSIQSAQSVTGQEDVLKSKGFTIVDTLHVEDSSVKPLVSKNFNKKVVEKMGLVYLVQYSPDQFKSSNIAKKELRKELMDLGFKVRYISENYKMMAIEGTATLQGVHPNQVWAYNMIKAPEAWAITSGSLSVKVAVLDTGIDHNHPSLANFVNTNLGRSFVGGNTMDVQGHGTHVAGTIASYGSVSGVMQSATLIPVKVLDNSGSGSLYGITQGILYAADIDIDVINMSLGGGGYNQSMDEAVQTAVAQGVIVVAATGNDGASSISYPAAYSSVIAVGSVDSNRVRSSFSNYGSGLELMAPGSNIYSTYPNGRYRSLSGTSMATPHVAGVAGLIRAANPDIVVAQARQILRDTAQEAGSFTQYGYGIVDAHAAVVAASGGSGG

SEQ ID NO: 1345 - DNA, 1239 bp, synthetic construct
  misc_feature 1..1239: note = Variant of serine peptidase from Bacillus sinesaloumensis
  source 1..1239: mol_type = other DNA
atggcagatcaagctagtcaagctaatggaaaccaggacgtcattgaaggcgagctgatcgtttcagtggaaccgaagaacggtaaacctgatgtgagcattcaaagtgcacaatccgtaacagggcaggaagacgtccttaaatcgaaaggctttacgatcgttgataccttgcatgtagaggatagcagcgtcaagccactcgtctcgaagaatttcaataagaaagtggtggagaagatgggactggtgtatcttgttcaatactctccggaccagtttaaaagttccaacattgcgaagaaagaactcagaaaagaattgatggatctgggctttaaagtccgctatataagcgaaaattacaagatgatggcgatcgaaggtacagccactcttcagggggtgcaccctaaccaagtttgggcgtataatatgattaaagctccggaagcgtgggctattacgcgcggatccctgagcgttaaagtagcagtcctggatacagggatcgaccataatcacccatccttggccaacttcgtgaatactaatcttggccgctcgtttgttggaggaaacaccatggatgttcaaggtcatggcacacatgttgctggcacgattgcatcttatgggagtgtaagcggagtgatgcagagtgcgacactgatcccggtcaaagtgctcgataattctggcagcgggtccctttacggtattacgcagggcatattgtatgccgccgacatcgatgtagacgtcattaacatgtctctgggtggaggaggctataatcagagcatggatgaggctactcaaacagcagttgctcagggaaccattgtagtagcagcgactggcaatgatggtgcatcgtcgatcagttatcctgctgcctacagcagcgtcattgcggtgggatctgtggaccaaaatcgtgttcgatcctcgttttctaactatggatctgggcttgaactgatggcaccgggcagcaacatctacagtacgtatcctaatggcagatatcgcacgttgagtggtacaagcatggctactccgcacgttgcgggcgtagctgggctcattcgcgcagccaacccagacatagtggtcgcgcaagcccgtcagattctgcgggataccgcgcaagaagcaggatcgttcacacagtacggctatggaatcgtcgatgctcatgccgccgttgttgctgcatccggtggtacgggcggc

SEQ ID NO: 1346 - protein, 413 aa, synthetic construct
  REGION 1..413: note = Variant of serine peptidase from Bacillus sinesaloumensis
MADQASQANGNQDVIEGELIVSVEPKNGKPDVSIQSAQSVTGQEDVLKSKGFTIVDTLHVEDSSVKPLVSKNFNKKVVEKMGLVYLVQYSPDQFKSSNIAKKELRKELMDLGFKVRYISENYKMMAIEGTATLQGVHPNQVWAYNMIKAPEAWAITRGSLSVKVAVLDTGIDHNHPSLANFVNTNLGRSFVGGNTMDVQGHGTHVAGTIASYGSVSGVMQSATLIPVKVLDNSGSGSLYGITQGILYAADIDVDVINMSLGGGGYNQSMDEATQTAVAQGTIVVAATGNDGASSISYPAAYSSVIAVGSVDQNRVRSSFSNYGSGLELMAPGSNIYSTYPNGRYRTLSGTSMATPHVAGVAGLIRAANPDIVVAQARQILRDTAQEAGSFTQYGYGIVDAHAAVVAASGGTGG

SEQ ID NO: 1347 - DNA, 1239 bp, synthetic construct
  misc_feature 1..1239: note = Variant of serine peptidase from Bacillus sinesaloumensis
  source 1..1239: mol_type = other DNA
atggcagatcaagctagtcaagctaatggaaaccaggacgtcattgaaggcgagctgatcgtttcagtggaaccgaagaacggtaaacctgatgtgagcattcaaagtgcacaatccgtaacagggcaggaagacgtccttaaatcgaaaggctttacgatcgttgataccttgcatgtagaggatagcagcgtcaagccactcgtctcgaagaatttcaataagaaagtggtggagaagatgggactggtgtatcttgttcaatactctccggaccagtttaaaagttccaacattgcgaagaaagaactcagaaaagaattgatggatctgggctttaaagtccgctatataagcgaaaattacaagatgatggcgatcgaaggtacagccactcttcagggggtgcacccttgtcaagtttgggcgtataatatgattaaagctccggaagcgtgggctattacgaagggatccctgagcgttaaagtagcagtcctggatacagggatcgaccataatcacccatccttggccaacttcgtgaatactaatcttggccgctcgtttgttggaggaaacaccatggatgttcaaggtcatggcacacatgttgctggcacgattgcatcttatgggagtgtaagcggagtgatgcagagtgcgacactgatcccggtcaaagtgctcgataattctggcagcgggtccctttacggtattacgcagggcatattgtatgccgccgacatcgatgtagacgtcattaacatgtctctgggtggaggaggctataatcagggcatggatgaggctttccaaacagcagttgctcagggagttattgtagtagcagcgactggcaatgatggtgcatcgtcgatcagttatcctgctgcctacagcagcgtcattgcggtgggatctgtggaccaaaatcgtgttcgatcctcgttttctaactatggatctgggcttgaactgatggcaccgggcagcaacatctacagtacgtatcctaatggcagatatcgcgcgttgagtggtacaagcatggctactccgcacgttgcgggcgtagctgggctcattcgcgcagccaacccagacatagtggtcgcgcaagcccgtcagattctgcgggataccgcgcaagaagcaggatcgttcacacagtacggctatggaatcgtcgatgctcatgccgccgttgttgctgcatccggtggttcgggcggc

SEQ ID NO: 1348 - protein, 413 aa, synthetic construct
  REGION 1..413: note = Variant of serine peptidase from Bacillus sinesaloumensis
MADQASQANGNQDVIEGELIVSVEPKNGKPDVSIQSAQSVTGQEDVLKSKGFTIVDTLHVEDSSVKPLVSKNFNKKVVEKMGLVYLVQYSPDQFKSSNIAKKELRKELMDLGFKVRYISENYKMMAIEGTATLQGVHPCQVWAYNMIKAPEAWAITKGSLSVKVAVLDTGIDHNHPSLANFVNTNLGRSFVGGNTMDVQGHGTHVAGTIASYGSVSGVMQSATLIPVKVLDNSGSGSLYGITQGILYAADIDVDVINMSLGGGGYNQGMDEAFQTAVAQGVIVVAATGNDGASSISYPAAYSSVIAVGSVDQNRVRSSFSNYGSGLELMAPGSNIYSTYPNGRYRALSGTSMATPHVAGVAGLIRAANPDIVVAQARQILRDTAQEAGSFTQYGYGIVDAHAAVVAASGGSGG

SEQ ID NO: 1349 - DNA, 1239 bp, synthetic construct
  misc_feature 1..1239: note = Variant of serine peptidase from Bacillus sinesaloumensis
  source 1..1239: mol_type = other DNA
atggcagatcaagctagtcaagctaatggaaaccaggacgtcattgaaggcgagctgatcgtttcagtggaaccgaagaacggtaaacctgatgtgagcattcaaagtgcacaatccgtaacagggcaggaagacgtccttaaatcgaaaggctttacgatcgttgataccttgcatgtagaggatagcagcgtcaagccactcgtctcgaagaatttcaataagaaagtggtggagaagatgggactggtgtatcttgttcaatactctccggaccagtttaaaagttccaacattgcgaagaaagaactcagaaaagaattgatggatctgggctttaaagtccgctatataagcgaaaattacaagatgatggcgatcgaaggtacagccactcttcagggggtgcaccctaaccaagtttgggcgtataatatgattaaagctccggaagcgtgggctattacgtctggatccctgagcgttaaagtagcagtcctggatacagggatcgaccataatcacccatccttggccaacttcgtgaatactaatcttggccgctcgtttgttggaggaaacaccatggatgttcaaggtcatggcacacatgttgctggcacgattgcatcttatgggagtgtaagcggagtgatgcagagtgcgacactgatcccggtcaaagtgctcgataattctggcagcgggtccctttacggtattacgcagggcatattgtatgccgccgacatcgatgtagacgtcattaacatgtctctgggtggaggaggctataatcagagcatggatgaggctactcaaacagcagttgctcagggaaccattgtagtagcagcgactggcaatgatggtgcatcgtcgatcagttatcctgctgcctacagcagcgtcattgcggtgggatctgtggactccaatcgtgttcgatcctcgttttctaactatggatctgggcttgaactgatggcaccgggcagcaacatctacagtacgtatcctaatggcagatatcgcagtttgagtggtacaagcatggctactccgcacgttgcgggcgtagctgggctcattcgcgcagccaacccagacatagtggtcgcgcaagcccgtcagattctgcgggataccgcgcaagaagcaggatcgttcacacagtacggctatggaatcgtcgatgctcatgccgccgttgttgctgcatccggtggtacgggcggc

SEQ ID NO: 1350 - protein, 413 aa, synthetic construct
  REGION 1..413: note = Variant of serine peptidase from Bacillus sinesaloumensis
MADQASQANGNQDVIEGELIVSVEPKNGKPDVSIQSAQSVTGQEDVLKSKGFTIVDTLHVEDSSVKPLVSKNFNKKVVEKMGLVYLVQYSPDQFKSSNIAKKELRKELMDLGFKVRYISENYKMMAIEGTATLQGVHPNQVWAYNMIKAPEAWAITSGSLSVKVAVLDTGIDHNHPSLANFVNTNLGRSFVGGNTMDVQGHGTHVAGTIASYGSVSGVMQSATLIPVKVLDNSGSGSLYGITQGILYAADIDVDVINMSLGGGGYNQSMDEATQTAVAQGTIVVAATGNDGASSISYPAAYSSVIAVGSVDSNRVRSSFSNYGSGLELMAPGSNIYSTYPNGRYRSLSGTSMATPHVAGVAGLIRAANPDIVVAQARQILRDTAQEAGSFTQYGYGIVDAHAAVVAASGGTGG

SEQ ID NO: 1351 - DNA, 1239 bp, synthetic construct
  misc_feature 1..1239: note = Variant of serine peptidase from Bacillus sinesaloumensis
  source 1..1239: mol_type = other DNA
atggcagatcaagctagtcaagctaatggaaaccaggacgtcattgaaggcgagctgatcgtttcagtggaaccgaagaacggtaaacctgatgtgagcattcaaagtgcacaatccgtaacagggcaggaagacgtccttaaatcgaaaggctttacgatcgttgataccttgcatgtagaggatagcagcgtcaagccactcgtctcgaagaatttcaataagaaagtggtggagaagatgggactggtgtatcttgttcaatactctccggaccagtttaaaagttccaacattgcgaagaaagaactcagaaaagaattgatggatctgggctttaaagtccgctatataagcgaaaattacaagatgatggcgatcgaaggtacagccactcttcagggggtgcacccttgtcaagtttgggcgtataatatgattaaagctccggaagcgtgggctattacgtctggatccctgagcgttaaagtagcagtcctggatacagggatcgaccataatcacccatccttggccaacttcgtgaatactaatcttggccgctcgtttgttggaggaaacaccatggatgttcaaggtcatggcacacatgttgctggcacgattgcatcttatgggagtgtaagcggagtgatgcagagtgcgacactgatcccggtcaaagtgctcgataattctggcagcgggtccctttacggtattacgcagggcatattgtatgccgccgacatcgatatcgacgtcattaacatgtctctgggtggaggaggctataatcagttcatggatgaggctactcaaacagcagttgctcagggagttattgtagtagcagcgactggcaatgatggtgcatcgtcgatcagttatcctgctgcctacagcagcgtcattgcggtgggatctgtggacagcaatcgtgttcgatcctcgttttctaactatggatctgggcttgaactgatggcaccgggcagcaacatctacagtacgtatcctaatggcagatatcgctcgttgagtggtacaagcatggctactccgcacgttgcgggcgtagctgggctcattcgcgcagccaacccagacatagtggtcgcgcaagcccgtcagattctgcgggataccgcgcaagaagcaggatcgttcacacagtacggctatggaatcgtcgatgctcatgccgccgttgttgctgcatccggtggtagcggcggc

SEQ ID NO: 1352 - protein, 413 aa, synthetic construct
  REGION 1..413: note = Variant of serine peptidase from Bacillus sinesaloumensis
MADQASQANGNQDVIEGELIVSVEPKNGKPDVSIQSAQSVTGQEDVLKSKGFTIVDTLHVEDSSVKPLVSKNFNKKVVEKMGLVYLVQYSPDQFKSSNIAKKELRKELMDLGFKVRYISENYKMMAIEGTATLQGVHPCQVWAYNMIKAPEAWAITSGSLSVKVAVLDTGIDHNHPSLANFVNTNLGRSFVGGNTMDVQGHGTHVAGTIASYGSVSGVMQSATLIPVKVLDNSGSGSLYGITQGILYAADIDIDVINMSLGGGGYNQFMDEATQTAVAQGVIVVAATGNDGASSISYPAAYSSVIAVGSVDSNRVRSSFSNYGSGLELMAPGSNIYSTYPNGRYRSLSGTSMATPHVAGVAGLIRAANPDIVVAQARQILRDTAQEAGSFTQYGYGIVDAHAAVVAASGGSGG

SEQ ID NO: 1353 - DNA, 1239 bp, synthetic construct
  misc_feature 1..1239: note = Variant of serine peptidase from Bacillus sinesaloumensis
  source 1..1239: mol_type = other DNA
atggcagatcaagctagtcaagctaatggaaaccaggacgtcattgaaggcgagctgatcgtttcagtggaaccgaagaacggtaaacctgatgtgagcattcaaagtgcacaatccgtaacagggcaggaagacgtccttaaatcgaaaggctttacgatcgttgataccttgcatgtagaggatagcagcgtcaagccactcgtctcgaagaatttcaataagaaagtggtggagaagatgggactggtgtatcttgttcaatactctccggaccagtttaaaagttccaacattgcgaagaaagaactcagaaaagaattgatggatctgggctttaaagtccgctatataagcgaaaattacaagatgatggcgatcgaaggtacagccactcttcagggggtgcacccttgtcaagtttgggcgtataatatgattaaagctccggaagcgtgggctattacgcgcggatccctgagcgttaaagtagcagtcctggatacagggatcgaccataatcacccatccttggccaacttcgtgaatactaatcttggccgctcgtttgttggaggaaacaccatggatgttcaaggtcatggcacacatgttgctggcacgattgcatcttatgggagtgtaagcggagtgatgcagagtgcgacactgatcccggtcaaagtgctcgataattctggcagcgggtccctttacggtattacgcagggcatattgtatgccgccgacatcgatgcagacgtcattaacatgtctctgggtggaggaggctataatcagagcatggatgaggctgttcaaacagcagttgctcagggaaccattgtagtagcagcgactggcaatgatggtgcatcgtcgatcagttatcctgctgcctacagcagcgtcattgcggtgggatctgtggactccaatcgtgttcgatcctcgttttctaactatggatctgggcttgaactgatggcaccgggcagcaacatctacagtacgtatcctaatggcagatatcgcagtttgagtggtacaagcatggctactccgcacgttgcgggcgtagctgggctcattcgcgcagccaacccagacatagtggtcgcgcaagcccgtcagattctgcgggataccgcgcaagaagcaggatcgttcacacagtacggctatggaatcgtcgatgctcatgccgccgttgttgctgcatccggtggtacgggcggc

SEQ ID NO: 1354 - protein, 413 aa, synthetic construct
  REGION 1..413: note = Variant of serine peptidase from Bacillus sinesaloumensis
MADQASQANGNQDVIEGELIVSVEPKNGKPDVSIQSAQSVTGQEDVLKSKGFTIVDTLHVEDSSVKPLVSKNFNKKVVEKMGLVYLVQYSPDQFKSSNIAKKELRKELMDLGFKVRYISENYKMMAIEGTATLQGVHPCQVWAYNMIKAPEAWAITRGSLSVKVAVLDTGIDHNHPSLANFVNTNLGRSFVGGNTMDVQGHGTHVAGTIASYGSVSGVMQSATLIPVKVLDNSGSGSLYGITQGILYAADIDADVINMSLGGGGYNQSMDEAVQTAVAQGTIVVAATGNDGASSISYPAAYSSVIAVGSVDSNRVRSSFSNYGSGLELMAPGSNIYSTYPNGRYRSLSGTSMATPHVAGVAGLIRAANPDIVVAQARQILRDTAQEAGSFTQYGYGIVDAHAAVVAASGGTGG

SEQ ID NO: 1355 - DNA, 1239 bp, synthetic construct
  misc_feature 1..1239: note = Variant of serine peptidase from Bacillus sinesaloumensis
  source 1..1239: mol_type = other DNA
atggcagatcaagctagtcaagctaatggaaaccaggacgtcattgaaggcgagctgatcgtttcagtggaaccgaagaacggtaaacctgatgtgagcattcaaagtgcacaatccgtaacagggcaggaagacgtccttaaatcgaaaggctttacgatcgttgataccttgcatgtagaggatagcagcgtcaagccactcgtctcgaagaatttcaataagaaagtggtggagaagatgggactggtgtatcttgttcaatactctccggaccagtttaaaagttccaacattgcgaagaaagaactcagaaaagaattgatggatctgggctttaaagtccgctatataagcgaaaattacaagatgatggcgatcgaaggtacagccactcttcagggggtgcaccctaaccaagtttgggcgtataatatgattaaagctccggaagcgtgggctattacgggcggatccctgagcgttaaagtagcagtcctggatacagggatcgaccataatcacccatccttggccaacttcgtgaatactaatcttggccgctcgtttgttggaggaaacaccatggatgttcaaggtcatggcacacatgttgctggcacgattgcatcttatgggagtgtaagcggagtgatgcagagtgcgacactgatcccggtcaaagtgctcgataattctggcagcgggtccctttacggtattacgcagggcatattgtatgccgccgacatcgatgcggacgtcattaacatgtctctgggtggaggaggctataatcagagcatggatgaggctgttcaaacagcagttgctcagggaaccattgtagtagcagcgactggcaatgatggtgcatcgtcgatcagttatcctgctgcctacagcagcgtcattgcggtgggatctgtggactccaatcgtgttcgatcctcgttttctaactatggatctgggcttgaactgatggcaccgggcagcaacatctacagtacgtatcctaatggcagatatcgcagtttgagtggtacaagcatggctactccgcacgttgcgggcgtagctgggctcattcgcgcagccaacccagacatagtggtcgcgcaagcccgtcagattctgcgggataccgcgcaagaagcaggatcgttcacacagtacggctatggaatcgtcgatgctcatgccgccgttgttgctgcatccggtggtagcggcggc

SEQ ID NO: 1356 - protein, 413 aa, synthetic construct
  REGION 1..413: note = Variant of serine peptidase from Bacillus sinesaloumensis
MADQASQANGNQDVIEGELIVSVEPKNGKPDVSIQSAQSVTGQEDVLKSKGFTIVDTLHVEDSSVKPLVSKNFNKKVVEKMGLVYLVQYSPDQFKSSNIAKKELRKELMDLGFKVRYISENYKMMAIEGTATLQGVHPNQVWAYNMIKAPEAWAITGGSLSVKVAVLDTGIDHNHPSLANFVNTNLGRSFVGGNTMDVQGHGTHVAGTIASYGSVSGVMQSATLIPVKVLDNSGSGSLYGITQGILYAADIDADVINMSLGGGGYNQSMDEAVQTAVAQGTIVVAATGNDGASSISYPAAYSSVIAVGSVDSNRVRSSFSNYGSGLELMAPGSNIYSTYPNGRYRSLSGTSMATPHVAGVAGLIRAANPDIVVAQARQILRDTAQEAGSFTQYGYGIVDAHAAVVAASGGSGG

SEQ ID NO: 1357 - DNA, 1239 bp, synthetic construct
  misc_feature 1..1239: note = Variant of serine peptidase from Bacillus sinesaloumensis
  source 1..1239: mol_type = other DNA
atggcagatcaagctagtcaagctaatggaaaccaggacgtcattgaaggcgagctgatcgtttcagtggaaccgaagaacggtaaacctgatgtgagcattcaaagtgcacaatccgtaacagggcaggaagacgtccttaaatcgaaaggctttacgatcgttgataccttgcatgtagaggatagcagcgtcaagccactcgtctcgaagaatttcaataagaaagtggtggagaagatgggactggtgtatcttgttcaatactctccggaccagtttaaaagttccaacattgcgaagaaagaactcagaaaagaattgatggatctgggctttaaagtccgctatataagcgaaaattacaagatgatggcgatcgaaggtacagccactcttcagggggtgcaccctaaccaagtttgggcgtataatatgattaaagctccggaagcgtgggctattacgtctggatccctgagcgttaaagtagcagtcctggatacagggatcgaccataatcacccatccttggccaacttcgtgaatactaatcttggccgctcgtttgttggaggaaacaccatggatgttcaaggtcatggcacacatgttgctggcacgattgcatcttatgggagtgtaagcggagtgatgcagagtgcgacactgatcccggtcaaagtgctcgataattctggcagcgggtccctttacggtattacgcagggcatattgtatgccgccgacatcgatgcagacgtcattaacatgtctctgggtggaggaggctataatcagagcatggatgaggctactcaaacagcagttgctcagggaaccattgtagtagcagcgactggcaatgatggtgcatcgtcgatcagttatcctgctgcctacagcagcgtcattgcggtgggatctgtggacagcaatcgtgttcgatcctcgttttctaactatggatctgggcttgaactgatggcaccgggcagcaacatctacagtacgtatcctaatggcagatatcgcagtttgagtggtacaagcatggctactccgcacgttgcgggcgtagctgggctcattcgcgcagccaacccagacatagtggtcgcgcaagcccgtcagattctgcgggataccgcgcaagaagcaggatcgttcacacagtacggctatggaatcgtcgatgctcatgccgccgttgttgctgcatccggtggttcgggcggc

SEQ ID NO: 1358 - protein, 413 aa, synthetic construct
  REGION 1..413: note = Variant of serine peptidase from Bacillus sinesaloumensis
MADQASQANGNQDVIEGELIVSVEPKNGKPDVSIQSAQSVTGQEDVLKSKGFTIVDTLHVEDSSVKPLVSKNFNKKVVEKMGLVYLVQYSPDQFKSSNIAKKELRKELMDLGFKVRYISENYKMMAIEGTATLQGVHPNQVWAYNMIKAPEAWAITSGSLSVKVAVLDTGIDHNHPSLANFVNTNLGRSFVGGNTMDVQGHGTHVAGTIASYGSVSGVMQSATLIPVKVLDNSGSGSLYGITQGILYAADIDADVINMSLGGGGYNQSMDEATQTAVAQGTIVVAATGNDGASSISYPAAYSSVIAVGSVDSNRVRSSFSNYGSGLELMAPGSNIYSTYPNGRYRSLSGTSMATPHVAGVAGLIRAANPDIVVAQARQILRDTAQEAGSFTQYGYGIVDAHAAVVAASGGSGG

SEQ ID NO: 1359 - DNA, 1239 bp, synthetic construct
  misc_feature 1..1239: note = Variant of serine peptidase from Bacillus sinesaloumensis
  source 1..1239: mol_type = other DNA
atggcagatcaagctagtcaagctaatggaaaccaggacgtcattgaaggcgagctgatcgtttcagtggaaccgaagaacggtaaacctgatgtgagcattcaaagtgcacaatccgtaacagggcaggaagacgtccttaaatcgaaaggctttacgatcgttgataccttgcatgtagaggatagcagcgtcaagccactcgtctcgaagaatttcaataagaaagtggtggagaagatgggactggtgtatcttgttcaatactctccggaccagtttaaaagttccaacattgcgaagaaagaactcagaaaagaattgatggatctgggctttaaagtccgctatataagcgaaaattacaagatgatggcgatcgaaggtacagccactcttcagggggtgcacccttgtcaagtttgggcgtataatatgattaaagctccggaagcgtgggctattacgtctggatccctgagcgttaaagtagcagtcctggatacagggatcgaccataatcacccatccttggccaacttcgtgaatactaatcttggccgctcgtttgttggaggaaacaccatggatgttcaaggtcatggcacacatgttgctggcacgattgcatcttatgggagtgtaagcggagtgatgcagagtgcgacactgatcccggtcaaagtgctcgataattctggcagcgggtccctttacggtattacgcagggcatattgtatgccgccgacatcgatgtagacgtcattaacatgtctctgggtggaggaggctataatcagggcatggatgaggctttccaaacagcagttgctcagggagttattgtagtagcagcgactggcaatgatggtgcatcgtcgatcagttatcctgctgcctacagcagcgtcattgcggtgggatctgtggaccaaaatcgtgttcgatcctcgttttctaactatggatctgggcttgaactgatggcaccgggcagcaacatctacagtacgtatcctaatggcagatatcgctcgttgagtggtacaagcatggctactccgcacgttgcgggcgtagctgggctcattcgcgcagccaacccagacatagtggtcgcgcaagcccgtcagattctgcgggataccgcgcaagaagcaggatcgttcacacagtacggctatggaatcgtcgatgctcatgccgccgttgttgctgcatccggtggtacgggcggc

SEQ ID NO: 1360 - protein, 413 aa, synthetic construct
  REGION 1..413: note = Variant of serine peptidase from Bacillus sinesaloumensis
MADQASQANGNQDVIEGELIVSVEPKNGKPDVSIQSAQSVTGQEDVLKSKGFTIVDTLHVEDSSVKPLVSKNFNKKVVEKMGLVYLVQYSPDQFKSSNIAKKELRKELMDLGFKVRYISENYKMMAIEGTATLQGVHPCQVWAYNMIKAPEAWAITSGSLSVKVAVLDTGIDHNHPSLANFVNTNLGRSFVGGNTMDVQGHGTHVAGTIASYGSVSGVMQSATLIPVKVLDNSGSGSLYGITQGILYAADIDVDVINMSLGGGGYNQGMDEAFQTAVAQGVIVVAATGNDGASSISYPAAYSSVIAVGSVDQNRVRSSFSNYGSGLELMAPGSNIYSTYPNGRYRSLSGTSMATPHVAGVAGLIRAANPDIVVAQARQILRDTAQEAGSFTQYGYGIVDAHAAVVAASGGTGG

SEQ ID NO: 1361 - DNA, 1239 bp, synthetic construct
  misc_feature 1..1239: note = Variant of serine peptidase from Bacillus sinesaloumensis
  source 1..1239: mol_type = other DNA
atggcagatcaagctagtcaagctaatggaaaccaggacgtcattgaaggcgagctgatcgtttcagtggaaccgaagaacggtaaacctgatgtgagcattcaaagtgcacaatccgtaacagggcaggaagacgtccttaaatcgaaaggctttacgatcgttgataccttgcatgtagaggatagcagcgtcaagccactcgtctcgaagaatttcaataagaaagtggtggagaagatgggactggtgtatcttgttcaatactctccggaccagtttaaaagttccaacattgcgaagaaagaactcagaaaagaattgatggatctgggctttaaagtccgctatataagcgaaaattacaagatgatggcgatcgaaggtacagccactcttcagggggtgcaccctaaccaagtttgggcgtataatatgattaaagctccggaagcgtgggctattacgggcggatccctgagcgttaaagtagcagtcctggatacagggatcgaccataatcacccatccttggccaacttcgtgaatactaatcttggccgctcgtttgttggaggaaacaccatggatgttcaaggtcatggcacacatgttgctggcacgattgcatcttatgggagtgtaagcggagtgatgcagagtgcgacactgatcccggtcaaagtgctcgataattctggcagcgggtccctttacggtattacgcagggcatattgtatgccgccgacatcgatgtagacgtcattaacatgtctctgggtggaggaggctataatcagagcatggatgaggctgtccaaacagcagttgctcagggaaccattgtagtagcagcgactggcaatgatggtgcatcgtcgatcagttatcctgctgcctacagcagcgtcattgcggtgggatctgtggactccaatcgtgttcgatcctcgttttctaactatggatctgggcttgaactgatggcaccgggcagcaacatctacagtacgtatcctaatggcagatatcgcagtttgagtggtacaagcatggctactccgcacgttgcgggcgtagctgggctcattcgcgcagccaacccagacatagtggtcgcgcaagcccgtcagattctgcgggataccgcgcaagaagcaggatcgttcacacagtacggctatggaatcgtcgatgctcatgccgccgttgttgctgcatccggtggtacgggcggc

SEQ ID NO: 1362 - protein, 413 aa, synthetic construct
  REGION 1..413: note = Variant of serine peptidase from Bacillus sinesaloumensis
MADQASQANGNQDVIEGELIVSVEPKNGKPDVSIQSAQSVTGQEDVLKSKGFTIVDTLHVEDSSVKPLVSKNFNKKVVEKMGLVYLVQYSPDQFKSSNIAKKELRKELMDLGFKVRYISENYKMMAIEGTATLQGVHPNQVWAYNMIKAPEAWAITGGSLSVKVAVLDTGIDHNHPSLANFVNTNLGRSFVGGNTMDVQGHGTHVAGTIASYGSVSGVMQSATLIPVKVLDNSGSGSLYGITQGILYAADIDVDVINMSLGGGGYNQSMDEAVQTAVAQGTIVVAATGNDGASSISYPAAYSSVIAVGSVDSNRVRSSFSNYGSGLELMAPGSNIYSTYPNGRYRSLSGTSMATPHVAGVAGLIRAANPDIVVAQARQILRDTAQEAGSFTQYGYGIVDAHAAVVAASGGTGG

SEQ ID NO: 1363 - DNA, 1239 bp, synthetic construct
  misc_feature 1..1239: note = Variant of serine peptidase from Bacillus sinesaloumensis
  source 1..1239: mol_type = other DNA
atggcagatcaagctagtcaagctaatggaaaccaggacgtcattgaaggcgagctgatcgtttcagtggaaccgaagaacggtaaacctgatgtgagcattcaaagtgcacaatccgtaacagggcaggaagacgtccttaaatcgaaaggctttacgatcgttgataccttgcatgtagaggatagcagcgtcaagccactcgtctcgaagaatttcaataagaaagtggtggagaagatgggactggtgtatcttgttcaatactctccggaccagtttaaaagttccaacattgcgaagaaagaactcagaaaagaattgatggatctgggctttaaagtccgctatataagcgaaaattacaagatgatggcgatcgaaggtacagccactcttcagggggtgcacccttgtcaagtttgggcgtatgaaatgattaaagctccggaagcgtgggctattacgtctggatccctgagcgttaaagtagcagtcctggatacagggatcgaccataatcacccatccttggccaacttcgtgaatactaatcttggccgctcgtttgttggaggaaacaccatggatgttcaaggtcatggcacacatgttgctggcacgattgcatcttatgggagtgtaagcggagtgatgcagagtgcgacactgatcccggtcaaagtgctcgataattctggcagcgggtccctttacggtattacgcagggcatattgtatgccgccgacatcgatgtagacgtcattaacatgtctctgggtggaggaggctataatcagagcatggatgaggctgtccaaacagcagttgctcagggaaccattgtagtagcagcgactggcaatgatggtgcatcgtcgatcagttatcctgctgcctacagcagcgtcattgcggtgggatctgtggactccaatcgtgttcgatcctcgttttctaactatggatctgggcttgaactgatggcaccgggcagcaacatctacagtacgtatcctaatggcagatatcgcacgttgagtggtacaagcatggctactccgcacgttgcgggcgtagctgggctcattcgcgcagccaacccagacatagtggtcgcgcaagcccgtcagattctgcgggataccgcgcaagaagcaggatcgttcacacagtacggctatggaatcgtcgatgctcatgccgccgttgttgctgcatccggtggtagcggcggc

SEQ ID NO: 1364 - protein, 413 aa, synthetic construct
  REGION 1..413: note = Variant of serine peptidase from Bacillus sinesaloumensis
MADQASQANGNQDVIEGELIVSVEPKNGKPDVSIQSAQSVTGQEDVLKSKGFTIVDTLHVEDSSVKPLVSKNFNKKVVEKMGLVYLVQYSPDQFKSSNIAKKELRKELMDLGFKVRYISENYKMMAIEGTATLQGVHPCQVWAYEMIKAPEAWAITSGSLSVKVAVLDTGIDHNHPSLANFVNTNLGRSFVGGNTMDVQGHGTHVAGTIASYGSVSGVMQSATLIPVKVLDNSGSGSLYGITQGILYAADIDVDVINMSLGGGGYNQSMDEAVQTAVAQGTIVVAATGNDGASSISYPAAYSSVIAVGSVDSNRVRSSFSNYGSGLELMAPGSNIYSTYPNGRYRTLSGTSMATPHVAGVAGLIRAANPDIVVAQARQILRDTAQEAGSFTQYGYGIVDAHAAVVAASGGSGG

SEQ ID NO: 1365 - DNA, 1239 bp, synthetic construct
  misc_feature 1..1239: note = Variant of serine peptidase from Bacillus sinesaloumensis
  source 1..1239: mol_type = other DNA
atggcagatcaagctagtcaagctaatggaaaccaggacgtcattgaaggcgagctgatcgtttcagtggaaccgaagaacggtaaacctgatgtgagcattcaaagtgcacaatccgtaacagggcaggaagacgtccttaaatcgaaaggctttacgatcgttgataccttgcatgtagaggatagcagcgtcaagccactcgtctcgaagaatttcaataagaaagtggtggagaagatgggactggtgtatcttgttcaatactctccggaccagtttaaaagttccaacattgcgaagaaagaactcagaaaagaattgatggatctgggctttaaagtccgctatataagcgaaaattacaagatgatggcgatcgaaggtacagccactcttcagggggtgcacccttgtcaagtttgggcgtataatatgattaaagctccggaagcgtgggctattacgaagggatccctgagcgttaaagtagcagtcctggatacagggatcgaccataatcacccatccttggccaacttcgtgaatactaatcttggccgctcgtttgttggaggaaacaccatggatgttcaaggtcatggcacacatgttgctggcacgattgcatcttatgggagtgtaagcggagtgatgcagagtgcgacactgatcccggtcaaagtgctcgataattctggcagcgggtccctttacggtattacgcagggcatattgtatgccgccgacatcgatgtagacgtcattaacatgtctctgggtggaggaggctataatcagagcatggatgaggctactcaaacagcagttgctcagggaaccattgtagtagcagcgactggcaatgatggtgcatcgtcgatcagttatcctgctgcctacagcagcgtcattgcggtgggatctgtggaccaaaatcgtgttcgatcctcgttttctaactatggatctgggcttgaactgatggcaccgggcagcaacatctacagtacgtatcctaatggcagatatcgctcgttgagtggtacaagcatggctactccgcacgttgcgggcgtagctgggctcattcgcgcagccaacccagacatagtggtcgcgcaagcccgtcagattctgcgggataccgcgcaagaagcaggatcgttcacacagtacggctatggaatcgtcgatgctcatgccgccgttgttgctgcatccggtggttcgggcggc

SEQ ID NO: 1366 - protein, 413 aa, synthetic construct
  REGION 1..413: note = Variant of serine peptidase from Bacillus sinesaloumensis
MADQASQANGNQDVIEGELIVSVEPKNGKPDVSIQSAQSVTGQEDVLKSKGFTIVDTLHVEDSSVKPLVSKNFNKKVVEKMGLVYLVQYSPDQFKSSNIAKKELRKELMDLGFKVRYISENYKMMAIEGTATLQGVHPCQVWAYNMIKAPEAWAITKGSLSVKVAVLDTGIDHNHPSLANFVNTNLGRSFVGGNTMDVQGHGTHVAGTIASYGSVSGVMQSATLIPVKVLDNSGSGSLYGITQGILYAADIDVDVINMSLGGGGYNQSMDEATQTAVAQGTIVVAATGNDGASSISYPAAYSSVIAVGSVDQNRVRSSFSNYGSGLELMAPGSNIYSTYPNGRYRSLSGTSMATPHVAGVAGLIRAANPDIVVAQARQILRDTAQEAGSFTQYGYGIVDAHAAVVAASGGSGG

SEQ ID NO: 1367 - DNA, 1239 bp, synthetic construct
  misc_feature 1..1239: note = Variant of serine peptidase from Bacillus sinesaloumensis
  source 1..1239: mol_type = other DNA
atggcagatcaagctagtcaagctaatggaaaccaggacgtcattgaaggcgagctgatcgtttcagtggaaccgaagaacggtaaacctgatgtgagcattcaaagtgcacaatccgtaacagggcaggaagacgtccttaaatcgaaaggctttacgatcgttgataccttgcatgtagaggatagcagcgtcaagccactcgtctcgaagaatttcaataagaaagtggtggagaagatgggactggtgtatcttgttcaatactctccggaccagtttaaaagttccaacattgcgaagaaagaactcagaaaagaattgatggatctgggctttaaagtccgctatataagcgaaaattacaagatgatggcgatcgaaggtacagccactcttcagggggtgcacccttgtcaagtttgggcgtataatatgattaaagctccggaagcgtgggctattacgggcggatccctgagcgttaaagtagcagtcctggatacagggatcgaccataatcacccatccttggccaacttcgtgaatactaatcttggccgctcgtttgttggaggaaacaccatggatgttcaaggtcatggcacacatgttgctggcacgattgcatcttatgggagtgtaagcggagtgatgcagagtgcgacactgatcccggtcaaagtgctcgataattctggcagcgggtccctttacggtattacgcagggcatattgtatgccgccgacatcgatgcagacgtcattaacatgtctctgggtggaggaggctataatcagggcatggatgaggctactcaaacagcagttgctcagggaaccattgtagtagcagcgactggcaatgatggtgcatcgtcgatcagttatcctgctgcctacagcagcgtcattgcggtgggatctgtggaccaaaatcgtgttcgatcctcgttttctaactatggatctgggcttgaactgatggcaccgggcagcaacatctacagtacgtatcctaatggcagatatcgcacgttgagtggtacaagcatggctactccgcacgttgcgggcgtagctgggctcattcgcgcagccaacccagacatagtggtcgcgcaagcccgtcagattctgcgggataccgcgcaagaagcaggatcgttcacacagtacggctatggaatcgtcgatgctcatgccgccgttgttgctgcatccggtggttcgggcggc

SEQ ID NO: 1368 - protein, 413 aa, synthetic construct
  REGION 1..413: note = Variant of serine peptidase from Bacillus sinesaloumensis
MADQASQANGNQDVIEGELIVSVEPKNGKPDVSIQSAQSVTGQEDVLKSKGFTIVDTLHVEDSSVKPLVSKNFNKKVVEKMGLVYLVQYSPDQFKSSNIAKKELRKELMDLGFKVRYISENYKMMAIEGTATLQGVHPCQVWAYNMIKAPEAWAITGGSLSVKVAVLDTGIDHNHPSLANFVNTNLGRSFVGGNTMDVQGHGTHVAGTIASYGSVSGVMQSATLIPVKVLDNSGSGSLYGITQGILYAADIDADVINMSLGGGGYNQGMDEATQTAVAQGTIVVAATGNDGASSISYPAAYSSVIAVGSVDQNRVRSSFSNYGSGLELMAPGSNIYSTYPNGRYRTLSGTSMATPHVAGVAGLIRAANPDIVVAQARQILRDTAQEAGSFTQYGYGIVDAHAAVVAASGGSGG

SEQ ID NO: 1369 - DNA, 1239 bp, synthetic construct
  misc_feature 1..1239: note = Variant of serine peptidase from Bacillus sinesaloumensis
  source 1..1239: mol_type = other DNA
atggcagatcaagctagtcaagctaatggaaaccaggacgtcattgaaggcgagctgatcgtttcagtggaaccgaagaacggtaaacctgatgtgagcattcaaagtgcacaatccgtaacagggcaggaagacgtccttaaatcgaaaggctttacgatcgttgataccttgcatgtagaggatagcagcgtcaagccactcgtctcgaagaatttcaataagaaagtggtggagaagatgggactggtgtatcttgttcaatactctccggaccagtttaaaagttccaacattgcgaagaaagaactcagaaaagaattgatggatctgggctttaaagtccgctatataagcgaaaattacaagatgatggcgatcgaaggtacagccactcttcagggggtgcaccctaaccaagtttgggcgtataatatgattaaagctccggaagcgtgggctattacgggcggatccctgagcgttaaagtagcagtcctggatacagggatcgaccataatcacccatccttggccaacttcgtgaatactaatcttggccgctcgtttgttggaggaaacaccatggatgttcaaggtcatggcacacatgttgctggcacgattgcatcttatgggagtgtaagcggagtgatgcagagtgcgacactgatcccggtcaaagtgctcgataattctggcagcgggtccctttacggtattacgcagggcatattgtatgccgccgacatcgatgcagacgtcattaacatgtctctgggtggaggaggctataatcagagcatggatgaggctactcaaacagcagttgctcagggaaccattgtagtagcagcgactggcaatgatggtgcatcgtcgatcagttatcctgctgcctacagcagcgtcattgcggtgggatctgtggaccaaaatcgtgttcgatcctcgttttctaactatggatctgggcttgaactgatggcaccgggcagcaacatctacagtacgtatcctaatggcagatatcgcacgttgagtggtacaagcatggctactccgcacgttgcgggcgtagctgggctcattcgcgcagccaacccagacatagtggtcgcgcaagcccgtcagattctgcgggataccgcgcaagaagcaggatcgttcacacagtacggctatggaatcgtcgatgctcatgccgccgttgttgctgcatccggtggttcgggcggc

SEQ ID NO: 1370 - protein, 413 aa, synthetic construct
  REGION 1..413: note = Variant of serine peptidase from Bacillus sinesaloumensis
MADQASQANGNQDVIEGELIVSVEPKNGKPDVSIQSAQSVTGQEDVLKSKGFTIVDTLHVEDSSVKPLVSKNFNKKVVEKMGLVYLVQYSPDQFKSSNIAKKELRKELMDLGFKVRYISENYKMMAIEGTATLQGVHPNQVWAYNMIKAPEAWAITGGSLSVKVAVLDTGIDHNHPSLANFVNTNLGRSFVGGNTMDVQGHGTHVAGTIASYGSVSGVMQSATLIPVKVLDNSGSGSLYGITQGILYAADIDADVINMSLGGGGYNQSMDEATQTAVAQGTIVVAATGNDGASSISYPAAYSSVIAVGSVDQNRVRSSFSNYGSGLELMAPGSNIYSTYPNGRYRTLSGTSMATPHVAGVAGLIRAANPDIVVAQARQILRDTAQEAGSFTQYGYGIVDAHAAVVAASGGSGG

SEQ ID NO: 1371 - DNA, 1239 bp, synthetic construct
  misc_feature 1..1239: note = Variant of serine peptidase from Bacillus sinesaloumensis
  source 1..1239: mol_type = other DNA
atggcagatcaagctagtcaagctaatggaaaccaggacgtcattgaaggcgagctgatcgtttcagtggaaccgaagaacggtaaacctgatgtgagcattcaaagtgcacaatccgtaacagggcaggaagacgtccttaaatcgaaaggctttacgatcgttgataccttgcatgtagaggatagcagcgtcaagccactcgtctcgaagaatttcaataagaaagtggtggagaagatgggactggtgtatcttgttcaatactctccggaccagtttaaaagttccaacattgcgaagaaagaactcagaaaagaattgatggatctgggctttaaagtccgctatataagcgaaaattacaagatgatggcgatcgaaggtacagccactcttcagggggtgcacccttgtcaagtttgggcgtataatatgattaaagctccggaagcgtgggctattacgtctggatccctgagcgttaaagtagcagtcctggatacagggatcgaccataatcacccatccttggccaacttcgtgaatactaatcttggccgctcgtttgttggaggaaacaccatggatgttcaaggtcatggcacacatgttgctggcacgattgcatcttatgggagtgtaagcggagtgatgcagagtgcgacactgatcccggtcaaagtgctcgataattctggcagcgggtccctttacggtattacgcagggcatattgtatgccgccgacatcgatgcagacgtcattaacatgtctctgggtggaggaggctataatcagagcatggatgaggctgttcaaacagcagttgctcagggaaccattgtagtagcagcgactggcaatgatggtgcatcgtcgatcagttatcctgctgcctacagcagcgtcattgcggtgggatctgtggactccaatcgtgttcgatcctcgttttctaactatggatctgggcttgaactgatggcaccgggcagcaacatctacagtacgtatcctaatggcagatatcgcagtttgagtggtacaagcatggctactccgcacgttgcgggcgtagctgggctcattcgcgcagccaacccagacatagtggtcgcgcaagcccgtcagattctgcgggataccgcgcaagaagcaggatcgttcacacagtacggctatggaatcgtcgatgctcatgccgccgttgttgctgcatccggtggtacgggcggc

SEQ ID NO: 1372 - protein, 413 aa, synthetic construct
  REGION 1..413: note = Variant of serine peptidase from Bacillus sinesaloumensis
MADQASQANGNQDVIEGELIVSVEPKNGKPDVSIQSAQSVTGQEDVLKSKGFTIVDTLHVEDSSVKPLVSKNFNKKVVEKMGLVYLVQYSPDQFKSSNIAKKELRKELMDLGFKVRYISENYKMMAIEGTATLQGVHPCQVWAYNMIKAPEAWAITSGSLSVKVAVLDTGIDHNHPSLANFVNTNLGRSFVGGNTMDVQGHGTHVAGTIASYGSVSGVMQSATLIPVKVLDNSGSGSLYGITQGILYAADIDADVINMSLGGGGYNQSMDEAVQTAVAQGTIVVAATGNDGASSISYPAAYSSVIAVGSVDSNRVRSSFSNYGSGLELMAPGSNIYSTYPNGRYRSLSGTSMATPHVAGVAGLIRAANPDIVVAQARQILRDTAQEAGSFTQYGYGIVDAHAAVVAASGGTGG

SEQ ID NO: 1373 - DNA, 1239 bp, synthetic construct
  misc_feature 1..1239: note = Variant of serine peptidase from Bacillus sinesaloumensis
  source 1..1239: mol_type = other DNA
atggcagatcaagctagtcaagctaatggaaaccaggacgtcattgaaggcgagctgatcgtttcagtggaaccgaagaacggtaaacctgatgtgagcattcaaagtgcacaatccgtaacagggcaggaagacgtccttaaatcgaaaggctttacgatcgttgataccttgcatgtagaggatagcagcgtcaagccactcgtctcgaagaatttcaataagaaagtggtggagaagatgggactggtgtatcttgttcaatactctccggaccagtttaaaagttccaacattgcgaagaaagaactcagaaaagaattgatggatctgggctttaaagtccgctatataagcgaaaattacaagatgatggcgatcgaaggtacagccactcttcagggggtgcacccttgtcaagtttgggcgtataatatgattaaagctccggaagcgtgggctattacgtctggatccctgagcgttaaagtagcagtcctggatacagggatcgaccataatcacccatccttggccaacttcgtgaatactaatcttggccgctcgtttgttggaggaaacaccatggatgttcaaggtcatggcacacatgttgctggcacgattgcatcttatgggagtgtaagcggagtgatgcagagtgcgacactgatcccggtcaaagtgctcgataattctggcagcgggtccctttacggtattacgcagggcatattgtatgccgccgacatcgatgtagacgtcattaacatgtctctgggtggaggaggctataatcagggcatggatgaggctttccaaacagcagttgctcagggatgcattgtagtagcagcgactggcaatgatggtgcatcgtcgatcagttatcctgctgcctacagcagcgtcattgcggtgggatctgtggacatcaatcgtgttcgatcctcgttttctaactatggatctgggcttgaactgatggcaccgggcagcaacatctacagtacgtatcctaatggcagatatcgcacgttgagtggtacaagcatggctactccgcacgttgcgggcgtagctgggctcattcgcgcagccaacccagacatagtggtcgcgcaagcccgtcagattctgcgggataccgcgcaagaagcaggatcgttcacacagtacggctatggaatcgtcgatgctcatgccgccgttgttgctgcatccggtggtacgggcggc

SEQ ID NO: 1374 - protein, 413 aa, synthetic construct
  REGION 1..413: note = Variant of serine peptidase from Bacillus sinesaloumensis
MADQASQANGNQDVIEGELIVSVEPKNGKPDVSIQSAQSVTGQEDVLKSKGFTIVDTLHVEDSSVKPLVSKNFNKKVVEKMGLVYLVQYSPDQFKSSNIAKKELRKELMDLGFKVRYISENYKMMAIEGTATLQGVHPCQVWAYNMIKAPEAWAITSGSLSVKVAVLDTGIDHNHPSLANFVNTNLGRSFVGGNTMDVQGHGTHVAGTIASYGSVSGVMQSATLIPVKVLDNSGSGSLYGITQGILYAADIDVDVINMSLGGGGYNQGMDEAFQTAVAQGCIVVAATGNDGASSISYPAAYSSVIAVGSVDINRVRSSFSNYGSGLELMAPGSNIYSTYPNGRYRTLSGTSMATPHVAGVAGLIRAANPDIVVAQARQILRDTAQEAGSFTQYGYGIVDAHAAVVAASGGTGG

SEQ ID NO: 1375 - DNA, 1239 bp, synthetic construct
  misc_feature 1..1239: note = Variant of serine peptidase from Bacillus sinesaloumensis
  source 1..1239: mol_type = other DNA
atggcagatcaagctagtcaagctaatggaaaccaggacgtcattgaaggcgagctgatcgtttcagtggaaccgaagaacggtaaacctgatgtgagcattcaaagtgcacaatccgtaacagggcaggaagacgtccttaaatcgaaaggctttacgatcgttgataccttgcatgtagaggatagcagcgtcaagccactcgtctcgaagaatttcaataagaaagtggtggagaagatgggactggtgtatcttgttcaatactctccggaccagtttaaaagttccaacattgcgaagaaagaactcagaaaagaattgatggatctgggctttaaagtccgctatataagcgaaaattacaagatgatggcgatcgaaggtacagccactcttcagggggtgcaccctaaccaagtttgggcgtataatatgattaaagctccggaagcgtgggctattacgaagggatccctgagcgttaaagtagcagtcctggatacagggatcgaccataatcacccatccttggccaacttcgtgaatactaatcttggccgctcgtttgttggaggaaacaccatggatgttcaaggtcatggcacacatgttgctggcacgattgcatcttatgggagtgtaagcggagtgatgcagagtgcgacactgatcccggtcaaagtgctcgataattctggcagcgggtccctttacggtattacgcagggcatattgtatgccgccgacatcgatgcagacgtcattaacatgtctctgggtggaggaggctataatcagagcatggatgaggctttccaaacagcagttgctcagggaaccattgtagtagcagcgactggcaatgatggtgcatcgtcgatcagttatcctgctgcctacagcagcgtcattgcggtgggatctgtggactccaatcgtgttcgatcctcgttttctaactatggatctgggcttgaactgatggcaccgggcagcaacatctacagtacgtatcctaatggcagatatcgcacgttgagtggtacaagcatggctactccgcacgttgcgggcgtagctgggctcattcgcgcagccaacccagacatagtggtcgcgcaagcccgtcagattctgcgggataccgcgcaagaagcaggatcgttcacacagtacggctatggaatcgtcgatgctcatgccgccgttgttgctgcatccggtggtacgggcggc

SEQ ID NO: 1376 - protein, 413 aa, synthetic construct
  REGION 1..413: note = Variant of serine peptidase from Bacillus sinesaloumensis
MADQASQANGNQDVIEGELIVSVEPKNGKPDVSIQSAQSVTGQEDVLKSKGFTIVDTLHVEDSSVKPLVSKNFNKKVVEKMGLVYLVQYSPDQFKSSNIAKKELRKELMDLGFKVRYISENYKMMAIEGTATLQGVHPNQVWAYNMIKAPEAWAITKGSLSVKVAVLDTGIDHNHPSLANFVNTNLGRSFVGGNTMDVQGHGTHVAGTIASYGSVSGVMQSATLIPVKVLDNSGSGSLYGITQGILYAADIDADVINMSLGGGGYNQSMDEAFQTAVAQGTIVVAATGNDGASSISYPAAYSSVIAVGSVDSNRVRSSFSNYGSGLELMAPGSNIYSTYPNGRYRTLSGTSMATPHVAGVAGLIRAANPDIVVAQARQILRDTAQEAGSFTQYGYGIVDAHAAVVAASGGTGG

SEQ ID NO: 1377 - DNA, 1239 bp, synthetic construct
  misc_feature 1..1239: note = Variant of serine peptidase from Bacillus sinesaloumensis
  source 1..1239: mol_type = other DNA
atggcagatcaagctagtcaagctaatggaaaccaggacgtcattgaaggcgagctgatcgtttcagtggaaccgaagaacggtaaacctgatgtgagcattcaaagtgcacaatccgtaacagggcaggaagacgtccttaaatcgaaaggctttacgatcgttgataccttgcatgtagaggatagcagcgtcaagccactcgtctcgaagaatttcaataagaaagtggtggagaagatgggactggtgtatcttgttcaatactctccggaccagtttaaaagttccaacattgcgaagaaagaactcagaaaagaattgatggatctgggctttaaagtccgctatataagcgaaaattacaagatgatggcgatcgaaggtacagccactcttcagggggtgcacccttgtcaagtttgggcgtatgaaatgattaaagctccggaagcgtgggctattacgggcggatccctgagcattaaagtagcagtcctggatacagggatcgaccataatcacccatccttggccaacttcgtgaatactaatcttggccgctcgtttgttggaggaaacaccatggatgttcaaggtcatggcacacatgttgctggcacgattgcatcttatgggagtgtaagcggagtgatgcagagtgcgacactgatcccggtcaaagtgctcgataattctggcagcgggtccctttacggtattacgcagggcatattgtatgccgccgacatcgatgtagacgtcattaacatgtctctgggtggaggaggctataatcagagcatggatgaggctttccaaacagcagttgctcagggagttattgtagtagcagcgactggcaatgatggtgcatcgtcgatcagttatcctgctgcctacagcagcgtcattgcggtgggatctgtggaccaaaatcgtgttcgatcctcgttttctaactatggatctgggcttgaactgatggcaccgggcagcaacatctacagtacgtatcctaatggcagatatcgcagtttgagtggtacaagcatggctactccgcacgttgcgggcgtagctgggctcattcgcgcagccaacccagacatagtggtcgcgcaagcccgtcagattctgcgggataccgcgcaagaagcaggatcgttcacacagtacggctatggaatcgtcgatgctcatgccgccgttgttgctgcatccggtggttcgggcggc

SEQ ID NO: 1378 - protein, 413 aa, synthetic construct
  REGION 1..413: note = Variant of serine peptidase from Bacillus sinesaloumensis
MADQASQANGNQDVIEGELIVSVEPKNGKPDVSIQSAQSVTGQEDVLKSKGFTIVDTLHVEDSSVKPLVSKNFNKKVVEKMGLVYLVQYSPDQFKSSNIAKKELRKELMDLGFKVRYISENYKMMAIEGTATLQGVHPCQVWAYEMIKAPEAWAITGGSLSIKVAVLDTGIDHNHPSLANFVNTNLGRSFVGGNTMDVQGHGTHVAGTIASYGSVSGVMQSATLIPVKVLDNSGSGSLYGITQGILYAADIDVDVINMSLGGGGYNQSMDEAFQTAVAQGVIVVAATGNDGASSISYPAAYSSVIAVGSVDQNRVRSSFSNYGSGLELMAPGSNIYSTYPNGRYRSLSGTSMATPHVAGVAGLIRAANPDIVVAQARQILRDTAQEAGSFTQYGYGIVDAHAAVVAASGGSGG

SEQ ID NO: 1379 - DNA, 1239 bp, synthetic construct
  misc_feature 1..1239: note = Variant of serine peptidase from Bacillus sinesaloumensis
  source 1..1239: mol_type = other DNA
atggcagatcaagctagtcaagctaatggaaaccaggacgtcattgaaggcgagctgatcgtttcagtggaaccgaagaacggtaaacctgatgtgagcattcaaagtgcacaatccgtaacagggcaggaagacgtccttaaatcgaaaggctttacgatcgttgataccttgcatgtagaggatagcagcgtcaagccactcgtctcgaagaatttcaataagaaagtggtggagaagatgggactggtgtatcttgttcaatactctccggaccagtttaaaagttccaacattgcgaagaaagaactcagaaaagaattgatggatctgggctttaaagtccgctatataagcgaaaattacaagatgatggcgatcgaaggtacagccactcttcagggggtgcacccttgtcaagtttgggcgtataatatgattaaagctccggaagcgtgggctattacgtctggatccctgagcgttaaagtagcagtcctggatacagggatcgaccataatcacccatccttggccaacttcgtgaatactaatcttggccgctcgtttgttggaggaaacaccatggatgttcaaggtcatggcacacatgttgctggcacgattgcatcttatgggagtgtaagcggagtgatgcagagtgcgacactgatcccggtcaaagtgctcgataattctggcagcgggtccctttacggtattacgcagggcatattgtatgccgccgacatcgatgtagacgtcattaacatgtctctgggtggaggaggctataatcagagcatggatgaggctactcaaacagcagttgctcagggatgcattgtagtagcagcgactggcaatgatggtgcatcgtcgatcagttatcctgctgcctacagcagcgtcattgcggtgggatctgtggaccaaaatcgtgttcgatcctcgttttctaactatggatctgggcttgaactgatggcaccgggcagcaacatctacagtacgtatcctaatggcagatatcgctcgttgagtggtacaagcatggctactccgcacgttgcgggcgtagctgggctcattcgcgcagccaacccagacatagtggtcgcgcaagcccgtcagattctgcgggataccgcgcaagaagcaggatcgttcacacagtacggctatggaatcgtcgatgctcatgccgccgttgttgctgcatccggtggttcgggcggc

SEQ ID NO: 1380 - protein, 413 aa, synthetic construct
  REGION 1..413: note = Variant of serine peptidase from Bacillus sinesaloumensis
MADQASQANGNQDVIEGELIVSVEPKNGKPDVSIQSAQSVTGQEDVLKSKGFTIVDTLHVEDSSVKPLVSKNFNKKVVEKMGLVYLVQYSPDQFKSSNIAKKELRKELMDLGFKVRYISENYKMMAIEGTATLQGVHPCQVWAYNMIKAPEAWAITSGSLSVKVAVLDTGIDHNHPSLANFVNTNLGRSFVGGNTMDVQGHGTHVAGTIASYGSVSGVMQSATLIPVKVLDNSGSGSLYGITQGILYAADIDVDVINMSLGGGGYNQSMDEATQTAVAQGCIVVAATGNDGASSISYPAAYSSVIAVGSVDQNRVRSSFSNYGSGLELMAPGSNIYSTYPNGRYRSLSGTSMATPHVAGVAGLIRAANPDIVVAQARQILRDTAQEAGSFTQYGYGIVDAHAAVVAASGGSGG

SEQ ID NO: 1381 - DNA, 1239 bp, synthetic construct
  misc_feature 1..1239: note = Variant of serine peptidase from Bacillus sinesaloumensis
  source 1..1239: mol_type = other DNA
atggcagatcaagctagtcaagctaatggaaaccaggacgtcattgaaggcgagctgatcgtttcagtggaaccgaagaacggtaaacctgatgtgagcattcaaagtgcacaatccgtaacagggcaggaagacgtccttaaatcgaaaggctttacgatcgttgataccttgcatgtagaggatagcagcgtcaagccactcgtctcgaagaatttcaataagaaagtggtggagaagatgggactggtgtatcttgttcaatactctccggaccagtttaaaagttccaacattgcgaagaaagaactcagaaaagaattgatggatctgggctttaaagtccgctatataagcgaaaattacaagatgatggcgatcgaaggtacagccactcttcagggggtgcaccctaaccaagtttgggcgtataatatgattaaagctccggaagcgtgggctattacgggcggatccctgagcgttaaagtagcagtcctggatacagggatcgaccataatcacccatccttggccaacttcgtgaatactaatcttggccgctcgtttgttggaggaaacaccatggatgttcaaggtcatggcacacatgttgctggcacgattgcatcttatgggagtgtaagcggagtgatgcagagtgcgacactgatcccggtcaaagtgctcgataattctggcagcgggtccctttacggtattacgcagggcatattgtatgccgccgacatcgatgtagacgtcattaacatgtctctgggtggaggaggctataatcagttcatggatgaggctttccaaacagcagttgctcagggagttattgtagtagcagcgactggcaatgatggtgcatcgtcgatcagttatcctgctgcctacagcagcgtcattgcggtgggatctgtggaccaaaatcgtgttcgatcctcgttttctaactatggatctgggcttgaactgatggcaccgggcagcaacatctacagtacgtatcctaatggcagatatcgctcgttgagtggtacaagcatggctactccgcacgttgcgggcgtagctgggctcattcgcgcagccaacccagacatagtggtcgcgcaagcccgtcagattctgcgggataccgcgcaagaagcaggatcgttcacacagtacggctatggaatcgtcgatgctcatgccgccgttgttgctgcatccggtggttcgggcggc

SEQ ID NO: 1382 - protein, 413 aa, synthetic construct
  REGION 1..413: note = Variant of serine peptidase from Bacillus sinesaloumensis
MADQASQANGNQDVIEGELIVSVEPKNGKPDVSIQSAQSVTGQEDVLKSKGFTIVDTLHVEDSSVKPLVSKNFNKKVVEKMGLVYLVQYSPDQFKSSNIAKKELRKELMDLGFKVRYISENYKMMAIEGTATLQGVHPNQVWAYNMIKAPEAWAITGGSLSVKVAVLDTGIDHNHPSLANFVNTNLGRSFVGGNTMDVQGHGTHVAGTIASYGSVSGVMQSATLIPVKVLDNSGSGSLYGITQGILYAADIDVDVINMSLGGGGYNQFMDEAFQTAVAQGVIVVAATGNDGASSISYPAAYSSVIAVGSVDQNRVRSSFSNYGSGLELMAPGSNIYSTYPNGRYRSLSGTSMATPHVAGVAGLIRAANPDIVVAQARQILRDTAQEAGSFTQYGYGIVDAHAAVVAASGGSGG

SEQ ID NO: 1383 - DNA, 1239 bp, synthetic construct
  misc_feature 1..1239: note = Variant of serine peptidase from Bacillus sinesaloumensis
  source 1..1239: mol_type = other DNA
atggcagatcaagctagtcaagctaatggaaaccaggacgtcattgaaggcgagctgatcgtttcagtggaaccgaagaacggtaaacctgatgtgagcattcaaagtgcacaatccgtaacagggcaggaagacgtccttaaatcgaaaggctttacgatcgttgataccttgcatgtagaggatagcagcgtcaagccactcgtctcgaagaatttcaataagaaagtggtggagaagatgggactggtgtatcttgttcaatactctccggaccagtttaaaagttccaacattgcgaagaaagaactcagaaaagaattgatggatctgggctttaaagtccgctatataagcgaaaattacaagatgatggcgatcgaaggtacagccactcttcagggggtgcacccttgtcaagtttgggcgtataatatgattaaagctccggaagcgtgggctattacgtctggatccctgagcgttaaagtagcagtcctggatacagggatcgaccataatcacccatccttggccaacttcgtgaatactaatcttggccgctcgtttgttggaggaaacaccatggatgttcaaggtcatggcacacatgttgctggcacgattgcatcttatgggagtgtaagcggagtgatgcagagtgcgacactgatcccggtcaaagtgctcgataattctggcagcgggtccctttacggtattacgcagggcatattgtatgccgccgacatcgatatcgacgtcattaacatgtctctgggtggaggaggctataatcagttcatggatgaggctgtccaaacagcagttgctcagggaaccattgtagtagcagcgactggcaatgatggtgcatcgtcgatcagttatcctgctgcctacagcagcgtcattgcggtgggatctgtggactccaatcgtgttcgatcctcgttttctaactatggatctgggcttgaactgatggcaccgggcagcaacatctacagtacgtatcctaatggcagatatcgcagtttgagtggtacaagcatggctactccgcacgttgcgggcgtagctgggctcattcgcgcagccaacccagacatagtggtcgcgcaagcccgtcagattctgcgggataccgcgcaagaagcaggatcgttcacacagtacggctatggaatcgtcgatgctcatgccgccgttgttgctgcatccggtggtagcggcggc

SEQ ID NO: 1384 - protein, 413 aa, synthetic construct
  REGION 1..413: note = Variant of serine peptidase from Bacillus sinesaloumensis
MADQASQANGNQDVIEGELIVSVEPKNGKPDVSIQSAQSVTGQEDVLKSKGFTIVDTLHVEDSSVKPLVSKNFNKKVVEKMGLVYLVQYSPDQFKSSNIAKKELRKELMDLGFKVRYISENYKMMAIEGTATLQGVHPCQVWAYNMIKAPEAWAITSGSLSVKVAVLDTGIDHNHPSLANFVNTNLGRSFVGGNTMDVQGHGTHVAGTIASYGSVSGVMQSATLIPVKVLDNSGSGSLYGITQGILYAADIDIDVINMSLGGGGYNQFMDEAVQTAVAQGTIVVAATGNDGASSISYPAAYSSVIAVGSVDSNRVRSSFSNYGSGLELMAPGSNIYSTYPNGRYRSLSGTSMATPHVAGVAGLIRAANPDIVVAQARQILRDTAQEAGSFTQYGYGIVDAHAAVVAASGGSGG

SEQ ID NO: 1385 - DNA, 1239 bp, synthetic construct
  misc_feature 1..1239: note = Variant of serine peptidase from Bacillus sinesaloumensis
  source 1..1239: mol_type = other DNA
atggcagatcaagctagtcaagctaatggaaaccaggacgtcattgaaggcgagctgatcgtttcagtggaaccgaagaacggtaaacctgatgtgagcattcaaagtgcacaatccgtaacagggcaggaagacgtccttaaatcgaaaggctttacgatcgttgataccttgcatgtagaggatagcagcgtcaagccactcgtctcgaagaatttcaataagaaagtggtggagaagatgggactggtgtatcttgttcaatactctccggaccagtttaaaagttccaacattgcgaagaaagaactcagaaaagaattgatggatctgggctttaaagtccgctatataagcgaaaattacaagatgatggcgatcgaaggtacagccactcttcagggggtgcacccttgtcaagtttgggcgtataatatgattaaagctccggaagcgtgggctattacgcgcggatccctgagcgttaaagtagcagtcctggatacagggatcgaccataatcacccatccttggccaacttcgtgaatactaatcttggccgctcgtttgttggaggaaacaccatggatgttcaaggtcatggcacacatgttgctggcacgattgcatcttatgggagtgtaagcggagtgatgcagagtgcgacactgatcccggtcaaagtgctcgataattctggcagcgggtccctttacggtattacgcagggcatattgtatgccgccgacatcgatgcagacgtcattaacatgtctctgggtggaggaggctataatcagagcatggatgaggctgttcaaacagcagttgctcagggaaccattgtagtagcagcgactggcaatgatggtgcatcgtcgatcagttatcctgctgcctacagcagcgtcattgcggtgggatctgtggaccaaaatcgtgttcgatcctcgttttctaactatggatctgggcttgaactgatggcaccgggcagcaacatctacagtacgtatcctaatggcagatatcgctcgttgagtggtacaagcatggctactccgcacgttgcgggcgtagctgggctcattcgcgcagccaacccagacatagtggtcgcgcaagcccgtcagattctgcgggataccgcgcaagaagcaggatcgttcacacagtacggctatggaatcgtcgatgctcatgccgccgttgttgctgcatccggtggttcgggcggc

SEQ ID NO: 1386 - protein, 413 aa, synthetic construct
  REGION 1..413: note = Variant of serine peptidase from Bacillus sinesaloumensis
MADQASQANGNQDVIEGELIVSVEPKNGKPDVSIQSAQSVTGQEDVLKSKGFTIVDTLHVEDSSVKPLVSKNFNKKVVEKMGLVYLVQYSPDQFKSSNIAKKELRKELMDLGFKVRYISENYKMMAIEGTATLQGVHPCQVWAYNMIKAPEAWAITRGSLSVKVAVLDTGIDHNHPSLANFVNTNLGRSFVGGNTMDVQGHGTHVAGTIASYGSVSGVMQSATLIPVKVLDNSGSGSLYGITQGILYAADIDADVINMSLGGGGYNQSMDEAVQTAVAQGTIVVAATGNDGASSISYPAAYSSVIAVGSVDQNRVRSSFSNYGSGLELMAPGSNIYSTYPNGRYRSLSGTSMATPHVAGVAGLIRAANPDIVVAQARQILRDTAQEAGSFTQYGYGIVDAHAAVVAASGGSGG

SEQ ID NO: 1387 - DNA, 1239 bp, synthetic construct
  misc_feature 1..1239: note = Variant of serine peptidase from Bacillus sinesaloumensis
  source 1..1239: mol_type = other DNA
atggcagatcaagctagtcaagctaatggaaaccaggacgtcattgaaggcgagctgatcgtttcagtggaaccgaagaacggtaaacctgatgtgagcattcaaagtgcacaatccgtaacagggcaggaagacgtccttaaatcgaaaggctttacgatcgttgataccttgcatgtagaggatagcagcgtcaagccactcgtctcgaagaatttcaataagaaagtggtggagaagatgggactggtgtatcttgttcaatactctccggaccagtttaaaagttccaacattgcgaagaaagaactcagaaaagaattgatggatctgggctttaaagtccgctatataagcgaaaattacaagatgatggcgatcgaaggtacagccactcttcagggggtgcaccctaaccaagtttgggcgtataatatgattaaagctccggaagcgtgggctattacgagcggatccctgagcgttaaagtagcagtcctggatacagggatcgaccataatcacccatccttggccaacttcgtgaatactaatcttggccgctcgtttgttggaggaaacaccatggatgttcaaggtcatggcacacatgttgctggcacgattgcatcttatgggagtgtaagcggagtgatgcagagtgcgacactgatcccggtcaaagtgctcgataattctggcagcgggtccctttacggtattacgcagggcatattgtatgccgccgacatcgatgtagacgtcattaacatgtctctgggtggaggaggctataatcagagcatggatgaggctactcaaacagcagttgctcagggatgcattgtagtagcagcgactggcaatgatggtgcatcgtcgatcagttatcctgctgcctacagcagcgtcattgcggtgggatctgtggactccaatcgtgttcgatcctcgttttctaactatggatctgggcttgaactgatggcaccgggcagcaacatctacagtacgtatcctaatggcagatatcgcacgttgagtggtacaagcatggctactccgcacgttgcgggcgtagctgggctcattcgcgcagccaacccagacatagtggtcgcgcaagcccgtcagattctgcgggataccgcgcaagaagcaggatcgttcacacagtacggctatggaatcgtcgatgctcatgccgccgttgttgctgcatccggtggttcgggcggc

SEQ ID NO: 1388 - protein, 413 aa, synthetic construct
  REGION 1..413: note = Variant of serine peptidase from Bacillus sinesaloumensis
MADQASQANGNQDVIEGELIVSVEPKNGKPDVSIQSAQSVTGQEDVLKSKGFTIVDTLHVEDSSVKPLVSKNFNKKVVEKMGLVYLVQYSPDQFKSSNIAKKELRKELMDLGFKVRYISENYKMMAIEGTATLQGVHPNQVWAYNMIKAPEAWAITSGSLSVKVAVLDTGIDHNHPSLANFVNTNLGRSFVGGNTMDVQGHGTHVAGTIASYGSVSGVMQSATLIPVKVLDNSGSGSLYGITQGILYAADIDVDVINMSLGGGGYNQSMDEATQTAVAQGCIVVAATGNDGASSISYPAAYSSVIAVGSVDSNRVRSSFSNYGSGLELMAPGSNIYSTYPNGRYRTLSGTSMATPHVAGVAGLIRAANPDIVVAQARQILRDTAQEAGSFTQYGYGIVDAHAAVVAASGGSGG

SEQ ID NO: 1389 - DNA, 1239 bp, synthetic construct
  misc_feature 1..1239: note = Variant of serine peptidase from Bacillus sinesaloumensis
  source 1..1239: mol_type = other DNA
atggcagatcaagctagtcaagctaatggaaaccaggacgtcattgaaggcgagctgatcgtttcagtggaaccgaagaacggtaaacctgatgtgagcattcaaagtgcacaatccgtaacagggcaggaagacgtccttaaatcgaaaggctttacgatcgttgataccttgcatgtagaggatagcagcgtcaagccactcgtctcgaagaatttcaataagaaagtggtggagaagatgggactggtgtatcttgttcaatactctccggaccagtttaaaagttccaacattgcgaagaaagaactcagaaaagaattgatggatctgggctttaaagtccgctatataagcgaaaattacaagatgatggcgatcgaaggtacagccactcttcagggggtgcaccctaaccaagtttgggcgtataatatgattaaagctccggaagcgtgggctattacgaagggatccctgagcgttaaagtagcagtcctggatacagggatcgaccataatcacccatccttggccaacttcgtgaatactaatcttggccgctcgtttgttggaggaaacaccatggatgttcaaggtcatggcacacatgttgctggcacgattgcatcttatgggagtgtaagcggagtgatgcagagtgcgacactgatcccggtcaaagtgctcgataattctggcagcgggtccctttacggtattacgcagggcatattgtatgccgccgacatcgatgtagacgtcattaacatgtctctgggtggaggaggctataatcagagcatggatgaggctgtccaaacagcagttgctcagggaaccattgtagtagcagcgactggcaatgatggtgcatcgtcgatcagttatcctgctgcctacagcagcgtcattgcggtgggatctgtggacatcaatcgtgttcgatcctcgttttctaactatggatctgggcttgaactgatggcaccgggcagcaacatctacagtacgtatcctaatggcagatatcgcacgttgagtggtacaagcatggctactccgcacgttgcgggcgtagctgggctcattcgcgcagccaacccagacatagtggtcgcgcaagcccgtcagattctgcgggataccgcgcaagaagcaggatcgttcacacagtacggctatggaatcgtcgatgctcatgccgccgttgttgctgcatccggtggtacgggcggc

SEQ ID NO: 1390 - protein, 413 aa, synthetic construct
  REGION 1..413: note = Variant of serine peptidase from Bacillus sinesaloumensis
MADQASQANGNQDVIEGELIVSVEPKNGKPDVSIQSAQSVTGQEDVLKSKGFTIVDTLHVEDSSVKPLVSKNFNKKVVEKMGLVYLVQYSPDQFKSSNIAKKELRKELMDLGFKVRYISENYKMMAIEGTATLQGVHPNQVWAYNMIKAPEAWAITKGSLSVKVAVLDTGIDHNHPSLANFVNTNLGRSFVGGNTMDVQGHGTHVAGTIASYGSVSGVMQSATLIPVKVLDNSGSGSLYGITQGILYAADIDVDVINMSLGGGGYNQSMDEAVQTAVAQGTIVVAATGNDGASSISYPAAYSSVIAVGSVDINRVRSSFSNYGSGLELMAPGSNIYSTYPNGRYRTLSGTSMATPHVAGVAGLIRAANPDIVVAQARQILRDTAQEAGSFTQYGYGIVDAHAAVVAASGGTGG

SEQ ID NO: 1391 - DNA, 1239 bp, synthetic construct
  misc_feature 1..1239: note = Variant of serine peptidase from Bacillus sinesaloumensis
  source 1..1239: mol_type = other DNA
atggcagatcaagctagtcaagctaatggaaaccaggacgtcattgaaggcgagctgatcgtttcagtggaaccgaagaacggtaaacctgatgtgagcattcaaagtgcacaatccgtaacagggcaggaagacgtccttaaatcgaaaggctttacgatcgttgataccttgcatgtagaggatagcagcgtcaagccactcgtctcgaagaatttcaataagaaagtggtggagaagatgggactggtgtatcttgttcaatactctccggaccagtttaaaagttccaacattgcgaagaaagaactcagaaaagaattgatggatctgggctttaaagtccgctatataagcgaaaattacaagatgatggcgatcgaaggtacagccactcttcagggggtgcaccctaaccaagtttgggcgtataatatgattaaagctccggaagcgtgggctattacgcgcggatccctgagcgttaaagtagcagtcctggatacagggatcgaccataatcacccatccttggccaacttcgtgaatactaatcttggccgctcgtttgttggaggaaacaccatggatgttcaaggtcatggcacacatgttgctggcacgattgcatcttatgggagtgtaagcggagtgatgcagagtgcgacactgatcccggtcaaagtgctcgataattctggcagcgggtccctttacggtattacgcagggcatattgtatgccgccgacatcgatgcagacgtcattaacatgtctctgggtggaggaggctataatcagagcatggatgaggctactcaaacagcagttgctcagggaaccattgtagtagcagcgactggcaatgatggtgcatcgtcgatcagttatcctgctgcctacagcagcgtcattgcggtgggatctgtggaccaaaatcgtgttcgatcctcgttttctaactatggatctgggcttgaactgatggcaccgggcagcaacatctacagtacgtatcctaatggcagatatcgcacgttgagtggtacaagcatggctactccgcacgttgcgggcgtagctgggctcattcgcgcagccaacccagacatagtggtcgcgcaagcccgtcagattctgcgggataccgcgcaagaagcaggatcgttcacacagtacggctatggaatcgtcgatgctcatgccgccgttgttgctgcatccggtggtacgggcggc

SEQ ID NO: 1392 - protein, 413 aa, synthetic construct
  REGION 1..413: note = Variant of serine peptidase from Bacillus sinesaloumensis
MADQASQANGNQDVIEGELIVSVEPKNGKPDVSIQSAQSVTGQEDVLKSKGFTIVDTLHVEDSSVKPLVSKNFNKKVVEKMGLVYLVQYSPDQFKSSNIAKKELRKELMDLGFKVRYISENYKMMAIEGTATLQGVHPNQVWAYNMIKAPEAWAITRGSLSVKVAVLDTGIDHNHPSLANFVNTNLGRSFVGGNTMDVQGHGTHVAGTIASYGSVSGVMQSATLIPVKVLDNSGSGSLYGITQGILYAADIDADVINMSLGGGGYNQSMDEATQTAVAQGTIVVAATGNDGASSISYPAAYSSVIAVGSVDQNRVRSSFSNYGSGLELMAPGSNIYSTYPNGRYRTLSGTSMATPHVAGVAGLIRAANPDIVVAQARQILRDTAQEAGSFTQYGYGIVDAHAAVVAASGGTGG

SEQ ID NO: 1393 - DNA, 1239 bp, synthetic construct
  misc_feature 1..1239: note = Variant of serine peptidase from Bacillus sinesaloumensis
  source 1..1239: mol_type = other DNA
atggcagatcaagctagtcaagctaatggaaaccaggacgtcattgaaggcgagctgatcgtttcagtggaaccgaagaacggtaaacctgatgtgagcattcaaagtgcacaatccgtaacagggcaggaagacgtccttaaatcgaaaggctttacgatcgttgataccttgcatgtagaggatagcagcgtcaagccactcgtctcgaagaatttcaataagaaagtggtggagaagatgggactggtgtatcttgttcaatactctccggaccagtttaaaagttccaacattgcgaagaaagaactcagaaaagaattgatggatctgggctttaaagtccgctatataagcgaaaattacaagatgatggcgatcgaaggtacagccactcttcagggggtgcacccttgtcaagtttgggcgtatgaaatgattaaagctccggaagcgtgggctattacgaagggatccctgagcgttaaagtagcagtcctggatacagggatcgaccataatcacccatccttggccaacttcgtgaatactaatcttggccgctcgtttgttggaggaaacaccatggatgttcaaggtcatggcacacatgttgctggcacgattgcatcttatgggagtgtaagcggagtgatgcagagtgcgacactgatcccggtcaaagtgctcgataattctggcagcgggtccctttacggtattacgcagggcatattgtatgccgccgacatcgatgtagacgtcattaacatgtctctgggtggaggaggctataatcagggcatggatgaggctgtccaaacagcagttgctcagggatgcattgtagtagcagcgactggcaatgatggtgcatcgtcgatcagttatcctgctgcctacagcagcgtcattgcggtgggatctgtggaccaaaatcgtgttcgatcctcgttttctaactatggatctgggcttgaactgatggcaccgggcagcaacatctacagtacgtatcctaatggcagatatcgctcgttgagtggtacaagcatggctactccgcacgttgcgggcgtagctgggctcattcgcgcagccaacccagacatagtggtcgcgcaagcccgtcagattctgcgggataccgcgcaagaagcaggatcgttcacacagtacggctatggaatcgtcgatgctcatgccgccgttgttgctgcatccggtggttcgggcggc

SEQ ID NO: 1394 - protein, 413 aa, synthetic construct
  REGION 1..413: note = Variant of serine peptidase from Bacillus sinesaloumensis
MADQASQANGNQDVIEGELIVSVEPKNGKPDVSIQSAQSVTGQEDVLKSKGFTIVDTLHVEDSSVKPLVSKNFNKKVVEKMGLVYLVQYSPDQFKSSNIAKKELRKELMDLGFKVRYISENYKMMAIEGTATLQGVHPCQVWAYEMIKAPEAWAITKGSLSVKVAVLDTGIDHNHPSLANFVNTNLGRSFVGGNTMDVQGHGTHVAGTIASYGSVSGVMQSATLIPVKVLDNSGSGSLYGITQGILYAADIDVDVINMSLGGGGYNQGMDEAVQTAVAQGCIVVAATGNDGASSISYPAAYSSVIAVGSVDQNRVRSSFSNYGSGLELMAPGSNIYSTYPNGRYRSLSGTSMATPHVAGVAGLIRAANPDIVVAQARQILRDTAQEAGSFTQYGYGIVDAHAAVVAASGGSGG

SEQ ID NO: 1395 - DNA, 1239 bp, synthetic construct
  misc_feature 1..1239: note = Variant of serine peptidase from Bacillus sinesaloumensis
  source 1..1239: mol_type = other DNA
atggcagatcaagctagtcaagctaatggaaaccaggacgtcattgaaggcgagctgatcgtttcagtggaaccgaagaacggtaaacctgatgtgagcattcaaagtgcacaatccgtaacagggcaggaagacgtccttaaatcgaaaggctttacgatcgttgataccttgcatgtagaggatagcagcgtcaagccactcgtctcgaagaatttcaataagaaagtggtggagaagatgggactggtgtatcttgttcaatactctccggaccagtttaaaagttccaacattgcgaagaaagaactcagaaaagaattgatggatctgggctttaaagtccgctatataagcgaaaattacaagatgatggcgatcgaaggtacagccactcttcagggggtgcacccttgtcaagtttgggcgtataatatgattaaagctccggaagcgtgggctattacgagcggatccctgagcgttaaagtagcagtcctggatacagggatcgaccataatcacccatccttggccaacttcgtgaatactaatcttggccgctcgtttgttggaggaaacaccatggatgttcaaggtcatggcacacatgttgctggcacgattgcatcttatgggagtgtaagcggagtgatgcagagtgcgacactgatcccggtcaaagtgctcgataattctggcagcgggtccctttacggtattacgcagggcatattgtatgccgccgacatcgatgcagacgtcattaacatgtctctgggtggaggaggctataatcagagcatggatgaggctactcaaacagcagttgctcagggaaccattgtagtagcagcgactggcaatgatggtgcatcgtcgatcagttatcctgctgcctacagcagcgtcattgcggtgggatctgtggaccaaaatcgtgttcgatcctcgttttctaactatggatctgggcttgaactgatggcaccgggcagcaacatctacagtacgtatcctaatggcagatatcgcacgttgagtggtacaagcatggctactccgcacgttgcgggcgtagctgggctcattcgcgcagccaacccagacatagtggtcgcgcaagcccgtcagattctgcgggataccgcgcaagaagcaggatcgttcacacagtacggctatggaatcgtcgatgctcatgccgccgttgttgctgcatccggtggttcgggcggc

SEQ ID NO: 1396 - protein, 413 aa, synthetic construct
  REGION 1..413: note = Variant of serine peptidase from Bacillus sinesaloumensis
MADQASQANGNQDVIEGELIVSVEPKNGKPDVSIQSAQSVTGQEDVLKSKGFTIVDTLHVEDSSVKPLVSKNFNKKVVEKMGLVYLVQYSPDQFKSSNIAKKELRKELMDLGFKVRYISENYKMMAIEGTATLQGVHPCQVWAYNMIKAPEAWAITSGSLSVKVAVLDTGIDHNHPSLANFVNTNLGRSFVGGNTMDVQGHGTHVAGTIASYGSVSGVMQSATLIPVKVLDNSGSGSLYGITQGILYAADIDADVINMSLGGGGYNQSMDEATQTAVAQGTIVVAATGNDGASSISYPAAYSSVIAVGSVDQNRVRSSFSNYGSGLELMAPGSNIYSTYPNGRYRTLSGTSMATPHVAGVAGLIRAANPDIVVAQARQILRDTAQEAGSFTQYGYGIVDAHAAVVAASGGSGG

SEQ ID NO: 1397 - DNA, 1239 bp, synthetic construct
  misc_feature 1..1239: note = Variant of serine peptidase from Bacillus sinesaloumensis
  source 1..1239: mol_type = other DNA
atggcagatcaagctagtcaagctaatggaaaccaggacgtcattgaaggcgagctgatcgtttcagtggaaccgaagaacggtaaacctgatgtgagcattcaaagtgcacaatccgtaacagggcaggaagacgtccttaaatcgaaaggctttacgatcgttgataccttgcatgtagaggatagcagcgtcaagccactcgtctcgaagaatttcaataagaaagtggtggagaagatgggactggtgtatcttgttcaatactctccggaccagtttaaaagttccaacattgcgaagaaagaactcagaaaagaattgatggatctgggctttaaagtccgctatataagcgaaaattacaagatgatggcgatcgaaggtacagccactcttcagggggtgcaccctaaccaagtttgggcgtataatatgattaaagctccggaagcgtgggctattacgaagggatccctgagcgttaaagtagcagtcctggatacagggatcgaccataatcacccatccttggccaacttcgtgaatactaatcttggccgctcgtttgttggaggaaacaccatggatgttcaaggtcatggcacacatgttgctggcacgattgcatcttatgggagtgtaagcggagtgatgcagagtgcgacactgatcccggtcaaagtgctcgataattctggcagcgggtccctttacggtattacgcagggcatattgtatgccgccgacatcgatgtagacgtcattaacatgtctctgggtggaggaggctataatcagttcatggatgaggctactcaaacagcagttgctcagggaaccattgtagtagcagcgactggcaatgatggtgcatcgtcgatcagttatcctgctgcctacagcagcgtcattgcggtgggatctgtggacatcaatcgtgttcgatcctcgttttctaactatggatctgggcttgaactgatggcaccgggcagcaacatctacagtacgtatcctaatggcagatatcgcacgttgagtggtacaagcatggctactccgcacgttgcgggcgtagctgggctcattcgcgcagccaacccagacatagtggtcgcgcaagcccgtcagattctgcgggataccgcgcaagaagcaggatcgttcacacagtacggctatggaatcgtcgatgctcatgccgccgttgttgctgcatccggtggttcgggcggc

SEQ ID NO: 1398 - protein, 413 aa, synthetic construct
  REGION 1..413: note = Variant of serine peptidase from Bacillus sinesaloumensis
MADQASQANGNQDVIEGELIVSVEPKNGKPDVSIQSAQSVTGQEDVLKSKGFTIVDTLHVEDSSVKPLVSKNFNKKVVEKMGLVYLVQYSPDQFKSSNIAKKELRKELMDLGFKVRYISENYKMMAIEGTATLQGVHPNQVWAYNMIKAPEAWAITKGSLSVKVAVLDTGIDHNHPSLANFVNTNLGRSFVGGNTMDVQGHGTHVAGTIASYGSVSGVMQSATLIPVKVLDNSGSGSLYGITQGILYAADIDVDVINMSLGGGGYNQFMDEATQTAVAQGTIVVAATGNDGASSISYPAAYSSVIAVGSVDINRVRSSFSNYGSGLELMAPGSNIYSTYPNGRYRTLSGTSMATPHVAGVAGLIRAANPDIVVAQARQILRDTAQEAGSFTQYGYGIVDAHAAVVAASGGSGG

SEQ ID NO: 1399 - DNA, 1239 bp, synthetic construct
  misc_feature 1..1239: note = Variant of serine peptidase from Bacillus sinesaloumensis
  source 1..1239: mol_type = other DNA
atggcagatcaagctagtcaagctaatggaaaccaggacgtcattgaaggcgagctgatcgtttcagtggaaccgaagaacggtaaacctgatgtgagcattcaaagtgcacaatccgtaacagggcaggaagacgtccttaaatcgaaaggctttacgatcgttgataccttgcatgtagaggatagcagcgtcaagccactcgtctcgaagaatttcaataagaaagtggtggagaagatgggactggtgtatcttgttcaatactctccggaccagtttaaaagttccaacattgcgaagaaagaactcagaaaagaattgatggatctgggctttaaagtccgctatataagcgaaaattacaagatgatggcgatcgaaggtacagccactcttcagggggtgcacccttgtcaagtttgggcgtataatatgattaaagctccggaagcgtgggctattacgagcggatccctgagcgttaaagtagcagtcctggatacagggatcgaccataatcacccatccttggccaacttcgtgaatactaatcttggccgctcgtttgttggaggaaacaccatggatgttcaaggtcatggcacacatgttgctggcacgattgcatcttatgggagtgtaagcggagtgatgcagagtgcgacactgatcccggtcaaagtgctcgataattctggcagcgggtccctttacggtattacgcagggcatattgtatgccgccgacatcgatgcggacgtcattaacatgtctctgggtggaggaggctataatcagggcatggatgaggctgtccaaacagcagttgctcagggaaccattgtagtagcagcgactggcaatgatggtgcatcgtcgatcagttatcctgctgcctacagcagcgtcattgcggtgggatctgtggacagcaatcgtgttcgatcctcgttttctaactatggatctgggcttgaactgatggcaccgggcagcaacatctacagtacgtatcctaatggcagatatcgcacgttgagtggtacaagcatggctactccgcacgttgcgggcgtagctgggctcattcgcgcagccaacccagacatagtggtcgcgcaagcccgtcagattctgcgggataccgcgcaagaagcaggatcgttcacacagtacggctatggaatcgtcgatgctcatgccgccgttgttgctgcatccggtggttcgggcggc

SEQ ID NO: 1400 - protein, 413 aa, synthetic construct
  REGION 1..413: note = Variant of serine peptidase from Bacillus sinesaloumensis
MADQASQANGNQDVIEGELIVSVEPKNGKPDVSIQSAQSVTGQEDVLKSKGFTIVDTLHVEDSSVKPLVSKNFNKKVVEKMGLVYLVQYSPDQFKSSNIAKKELRKELMDLGFKVRYISENYKMMAIEGTATLQGVHPCQVWAYNMIKAPEAWAITSGSLSVKVAVLDTGIDHNHPSLANFVNTNLGRSFVGGNTMDVQGHGTHVAGTIASYGSVSGVMQSATLIPVKVLDNSGSGSLYGITQGILYAADIDADVINMSLGGGGYNQGMDEAVQTAVAQGTIVVAATGNDGASSISYPAAYSSVIAVGSVDSNRVRSSFSNYGSGLELMAPGSNIYSTYPNGRYRTLSGTSMATPHVAGVAGLIRAANPDIVVAQARQILRDTAQEAGSFTQYGYGIVDAHAAVVAASGGSGG

SEQ ID NO: 1401 - DNA, 1239 bp, synthetic construct
  misc_feature 1..1239: note = Variant of serine peptidase from Bacillus sinesaloumensis
  source 1..1239: mol_type = other DNA
atggcagatcaagctagtcaagctaatggaaaccaggacgtcattgaaggcgagctgatcgtttcagtggaaccgaagaacggtaaacctgatgtgagcattcaaagtgcacaatccgtaacagggcaggaagacgtccttaaatcgaaaggctttacgatcgttgataccttgcatgtagaggatagcagcgtcaagccactcgtctcgaagaatttcaataagaaagtggtggagaagatgggactggtgtatcttgttcaatactctccggaccagtttaaaagttccaacattgcgaagaaagaactcagaaaagaattgatggatctgggctttaaagtccgctatataagcgaaaattacaagatgatggcgatcgaaggtacagccactcttcagggggtgcaccctaaccaagtttgggcgtataatatgattaaagctccggaagcgtgggctattacgaagggatccctgagcgttaaagtagcagtcctggatacagggatcgaccataatcacccatccttggccaacttcgtgaatactaatcttggccgctcgtttgttggaggaaacaccatggatgttcaaggtcatggcacacatgttgctggcacgattgcatcttatgggagtgtaagcggagtgatgcagagtgcgacactgatcccggtcaaagtgctcgataattctggcagcgggtccctttacggtattacgcagggcatattgtatgccgccgacatcgatgcagacgtcattaacatgtctctgggtggaggaggctataatcagagcatggatgaggctgttcaaacagcagttgctcagggaaccattgtagtagcagcgactggcaatgatggtgcatcgtcgatcagttatcctgctgcctacagcagcgtcattgcggtgggatctgtggactccaatcgtgttcgatcctcgttttctaactatggatctgggcttgaactgatggcaccgggcagcaacatctacagtacgtatcctaatggcagatatcgcagtttgagtggtacaagcatggctactccgcacgttgcgggcgtagctgggctcattcgcgcagccaacccagacatagtggtcgcgcaagcccgtcagattctgcgggataccgcgcaagaagcaggatcgttcacacagtacggctatggaatcgtcgatgctcatgccgccgttgttgctgcatccggtggtagcggcggc

SEQ ID NO: 1402 - protein, 413 aa, synthetic construct
  REGION 1..413: note = Variant of serine peptidase from Bacillus sinesaloumensis
MADQASQANGNQDVIEGELIVSVEPKNGKPDVSIQSAQSVTGQEDVLKSKGFTIVDTLHVEDSSVKPLVSKNFNKKVVEKMGLVYLVQYSPDQFKSSNIAKKELRKELMDLGFKVRYISENYKMMAIEGTATLQGVHPNQVWAYNMIKAPEAWAITKGSLSVKVAVLDTGIDHNHPSLANFVNTNLGRSFVGGNTMDVQGHGTHVAGTIASYGSVSGVMQSATLIPVKVLDNSGSGSLYGITQGILYAADIDADVINMSLGGGGYNQSMDEAVQTAVAQGTIVVAATGNDGASSISYPAAYSSVIAVGSVDSNRVRSSFSNYGSGLELMAPGSNIYSTYPNGRYRSLSGTSMATPHVAGVAGLIRAANPDIVVAQARQILRDTAQEAGSFTQYGYGIVDAHAAVVAASGGSGG

SEQ ID NO: 1403 - DNA, 1239 bp, synthetic construct
  misc_feature 1..1239: note = Variant of serine peptidase from Bacillus sinesaloumensis
  source 1..1239: mol_type = other DNA
atggcagatcaagctagtcaagctaatggaaaccaggacgtcattgaaggcgagctgatcgtttcagtggaaccgaagaacggtaaacctgatgtgagcattcaaagtgcacaatccgtaacagggcaggaagacgtccttaaatcgaaaggctttacgatcgttgataccttgcatgtagaggatagcagcgtcaagccactcgtctcgaagaatttcaataagaaagtggtggagaagatgggactggtgtatcttgttcaatactctccggaccagtttaaaagttccaacattgcgaagaaagaactcagaaaagaattgatggatctgggctttaaagtccgctatataagcgaaaattacaagatgatggcgatcgaaggtacagccactcttcagggggtgcaccctaaccaagtttgggcgtataatatgattaaagctccggaagcgtgggctattacgtctggatccctgagcgttaaagtagcagtcctggatacagggatcgaccataatcacccatccttggccaacttcgtgaatactaatcttggccgctcgtttgttggaggaaacaccatggatgttcaaggtcatggcacacatgttgctggcacgattgcatcttatgggagtgtaagcggagtgatgcagagtgcgacactgatcccggtcaaagtgctcgataattctggcagcgggtccctttacggtattacgcagggcatattgtatgccgccgacatcgatgcagacgtcattaacatgtctctgggtggaggaggctataatcagggcatggatgaggctttccaaacagcagttgctcagggaaccattgtagtagcagcgactggcaatgatggtgcatcgtcgatcagttatcctgctgcctacagcagcgtcattgcggtgggatctgtggaccaaaatcgtgttcgatcctcgttttctaactatggatctgggcttgaactgatggcaccgggcagcaacatctacagtacgtatcctaatggcagatatcgcacgttgagtggtacaagcatggctactccgcacgttgcgggcgtagctgggctcattcgcgcagccaacccagacatagtggtcgcgcaagcccgtcagattctgcgggataccgcgcaagaagcaggatcgttcacacagtacggctatggaatcgtcgatgctcatgccgccgttgttgctgcatccggtggttcgggcggc

SEQ ID NO: 1404 - protein, 413 aa, synthetic construct
  REGION 1..413: note = Variant of serine peptidase from Bacillus sinesaloumensis
MADQASQANGNQDVIEGELIVSVEPKNGKPDVSIQSAQSVTGQEDVLKSKGFTIVDTLHVEDSSVKPLVSKNFNKKVVEKMGLVYLVQYSPDQFKSSNIAKKELRKELMDLGFKVRYISENYKMMAIEGTATLQGVHPNQVWAYNMIKAPEAWAITSGSLSVKVAVLDTGIDHNHPSLANFVNTNLGRSFVGGNTMDVQGHGTHVAGTIASYGSVSGVMQSATLIPVKVLDNSGSGSLYGITQGILYAADIDADVINMSLGGGGYNQGMDEAFQTAVAQGTIVVAATGNDGASSISYPAAYSSVIAVGSVDQNRVRSSFSNYGSGLELMAPGSNIYSTYPNGRYRTLSGTSMATPHVAGVAGLIRAANPDIVVAQARQILRDTAQEAGSFTQYGYGIVDAHAAVVAASGGSGG

SEQ ID NO: 1405 - DNA, 1239 bp, synthetic construct
  misc_feature 1..1239: note = Variant of serine peptidase from Bacillus sinesaloumensis
  source 1..1239: mol_type = other DNA
atggcagatcaagctagtcaagctaatggaaaccaggacgtcattgaaggcgagctgatcgtttcagtggaaccgaagaacggtaaacctgatgtgagcattcaaagtgcacaatccgtaacagggcaggaagacgtccttaaatcgaaaggctttacgatcgttgataccttgcatgtagaggatagcagcgtcaagccactcgtctcgaagaatttcaataagaaagtggtggagaagatgggactggtgtatcttgttcaatactctccggaccagtttaaaagttccaacattgcgaagaaagaactcagaaaagaattgatggatctgggctttaaagtccgctatataagcgaaaattacaagatgatggcgatcgaaggtacagccactcttcagggggtgcacccttgtcaagtttgggcgtataatatgattaaagctccggaagcgtgggctattacgaagggatccctgagcgttaaagtagcagtcctggatacagggatcgaccataatcacccatccttggccaacttcgtgaatactaatcttggccgctcgtttgttggaggaaacaccatggatgttcaaggtcatggcacacatgttgctggcacgattgcatcttatgggagtgtaagcggagtgatgcagagtgcgacactgatcccggtcaaagtgctcgataattctggcagcgggtccctttacggtattacgcagggcatattgtatgccgccgacatcgatgtagacgtcattaacatgtctctgggtggaggaggctataatcagttcatggatgaggctttccaaacagcagttgctcagggaaccattgtagtagcagcgactggcaatgatggtgcatcgtcgatcagttatcctgctgcctacagcagcgtcattgcggtgggatctgtggaccaaaatcgtgttcgatcctcgttttctaactatggatctgggcttgaactgatggcaccgggcagcaacatctacagtacgtatcctaatggcagatatcgctcgttgagtggtacaagcatggctactccgcacgttgcgggcgtagctgggctcattcgcgcagccaacccagacatagtggtcgcgcaagcccgtcagattctgcgggataccgcgcaagaagcaggatcgttcacacagtacggctatggaatcgtcgatgctcatgccgccgttgttgctgcatccggtggttcgggcggc

SEQ ID NO: 1406 - protein, 413 aa, synthetic construct
  REGION 1..413: note = Variant of serine peptidase from Bacillus sinesaloumensis
MADQASQANGNQDVIEGELIVSVEPKNGKPDVSIQSAQSVTGQEDVLKSKGFTIVDTLHVEDSSVKPLVSKNFNKKVVEKMGLVYLVQYSPDQFKSSNIAKKELRKELMDLGFKVRYISENYKMMAIEGTATLQGVHPCQVWAYNMIKAPEAWAITKGSLSVKVAVLDTGIDHNHPSLANFVNTNLGRSFVGGNTMDVQGHGTHVAGTIASYGSVSGVMQSATLIPVKVLDNSGSGSLYGITQGILYAADIDVDVINMSLGGGGYNQFMDEAFQTAVAQGTIVVAATGNDGASSISYPAAYSSVIAVGSVDQNRVRSSFSNYGSGLELMAPGSNIYSTYPNGRYRSLSGTSMATPHVAGVAGLIRAANPDIVVAQARQILRDTAQEAGSFTQYGYGIVDAHAAVVAASGGSGG

SEQ ID NO: 1407 - DNA, 1239 bp, synthetic construct
  misc_feature 1..1239: note = Variant of serine peptidase from Bacillus sinesaloumensis
  source 1..1239: mol_type = other DNA
atggcagatcaagctagtcaagctaatggaaaccaggacgtcattgaaggcgagctgatcgtttcagtggaaccgaagaacggtaaacctgatgtgagcattcaaagtgcacaatccgtaacagggcaggaagacgtccttaaatcgaaaggctttacgatcgttgataccttgcatgtagaggatagcagcgtcaagccactcgtctcgaagaatttcaataagaaagtggtggagaagatgggactggtgtatcttgttcaatactctccggaccagtttaaaagttccaacattgcgaagaaagaactcagaaaagaattgatggatctgggctttaaagtccgctatataagcgaaaattacaagatgatggcgatcgaaggtacagccactcttcagggggtgcaccctaaccaagtttgggcgtataatatgattaaagctccggaagcgtgggctattacgaagggatccctgagcgttaaagtagcagtcctggatacagggatcgaccataatcacccatccttggccaacttcgtgaatactaatcttggccgctcgtttgttggaggaaacaccatggatgttcaaggtcatggcacacatgttgctggcacgattgcatcttatgggagtgtaagcggagtgatgcagagtgcgacactgatcccggtcaaagtgctcgataattctggcagcgggtccctttacggtattacgcagggcatattgtatgccgccgacatcgatgcagacgtcattaacatgtctctgggtggaggaggctataatcagagcatggatgaggctactcaaacagcagttgctcagggaaccattgtagtagcagcgactggcaatgatggtgcatcgtcgatcagttatcctgctgcctacagcagcgtcattgcggtgggatctgtggaccaaaatcgtgttcgatcctcgttttctaactatggatctgggcttgaactgatggcaccgggcagcaacatctacagtacgtatcctaatggcagatatcgcacgttgagtggtacaagcatggctactccgcacgttgcgggcgtagctgggctcattcgcgcagccaacccagacatagtggtcgcgcaagcccgtcagattctgcgggataccgcgcaagaagcaggatcgttcacacagtacggctatggaatcgtcgatgctcatgccgccgttgttgctgcatccggtggttcgggcggc

SEQ ID NO: 1408 - protein, 413 aa, synthetic construct
  REGION 1..413: note = Variant of serine peptidase from Bacillus sinesaloumensis
MADQASQANGNQDVIEGELIVSVEPKNGKPDVSIQSAQSVTGQEDVLKSKGFTIVDTLHVEDSSVKPLVSKNFNKKVVEKMGLVYLVQYSPDQFKSSNIAKKELRKELMDLGFKVRYISENYKMMAIEGTATLQGVHPNQVWAYNMIKAPEAWAITKGSLSVKVAVLDTGIDHNHPSLANFVNTNLGRSFVGGNTMDVQGHGTHVAGTIASYGSVSGVMQSATLIPVKVLDNSGSGSLYGITQGILYAADIDADVINMSLGGGGYNQSMDEATQTAVAQGTIVVAATGNDGASSISYPAAYSSVIAVGSVDQNRVRSSFSNYGSGLELMAPGSNIYSTYPNGRYRTLSGTSMATPHVAGVAGLIRAANPDIVVAQARQILRDTAQEAGSFTQYGYGIVDAHAAVVAASGGSGG

SEQ ID NO: 1409 - DNA, 1239 bp, synthetic construct
  misc_feature 1..1239: note = Variant of serine peptidase from Bacillus sinesaloumensis
  source 1..1239: mol_type = other DNA
atggcagatcaagctagtcaagctaatggaaaccaggacgtcattgaaggcgagctgatcgtttcagtggaaccgaagaacggtaaacctgatgtgagcattcaaagtgcacaatccgtaacagggcaggaagacgtccttaaatcgaaaggctttacgatcgttgataccttgcatgtagaggatagcagcgtcaagccactcgtctcgaagaatttcaataagaaagtggtggagaagatgggactggtgtatcttgttcaatactctccggaccagtttaaaagttccaacattgcgaagaaagaactcagaaaagaattgatggatctgggctttaaagtccgctatataagcgaaaattacaagatgatggcgatcgaaggtacagccactcttcagggggtgcacccttgtcaagtttgggcgtataatatgattaaagctccggaagcgtgggctattacgggcggatccctgagcgttaaagtagcagtcctggatacagggatcgaccataatcacccatccttggccaacttcgtgaatactaatcttggccgctcgtttgttggaggaaacaccatggatgttcaaggtcatggcacacatgttgctggcacgattgcatcttatgggagtgtaagcggagtgatgcagagtgcgacactgatcccggtcaaagtgctcgataattctggcagcgggtccctttacggtattacgcagggcatattgtatgccgccgacatcgatgtagacgtcattaacatgtctctgggtggaggaggctataatcagagcatggatgaggctgttcaaacagcagttgctcagggaaccattgtagtagcagcgactggcaatgatggtgcatcgtcgatcagttatcctgctgcctacagcagcgtcattgcggtgggatctgtggacagcaatcgtgttcgatcctcgttttctaactatggatctgggcttgaactgatggcaccgggcagcaacatctacagtacgtatcctaatggcagatatcgctcgttgagtggtacaagcatggctactccgcacgttgcgggcgtagctgggctcattcgcgcagccaacccagacatagtggtcgcgcaagcccgtcagattctgcgggataccgcgcaagaagcaggatcgttcacacagtacggctatggaatcgtcgatgctcatgccgccgttgttgctgcatccggtggttcgggcggc

SEQ ID NO: 1410 - protein, 413 aa, synthetic construct
  REGION 1..413: note = Variant of serine peptidase from Bacillus sinesaloumensis
MADQASQANGNQDVIEGELIVSVEPKNGKPDVSIQSAQSVTGQEDVLKSKGFTIVDTLHVEDSSVKPLVSKNFNKKVVEKMGLVYLVQYSPDQFKSSNIAKKELRKELMDLGFKVRYISENYKMMAIEGTATLQGVHPCQVWAYNMIKAPEAWAITGGSLSVKVAVLDTGIDHNHPSLANFVNTNLGRSFVGGNTMDVQGHGTHVAGTIASYGSVSGVMQSATLIPVKVLDNSGSGSLYGITQGILYAADIDVDVINMSLGGGGYNQSMDEAVQTAVAQGTIVVAATGNDGASSISYPAAYSSVIAVGSVDSNRVRSSFSNYGSGLELMAPGSNIYSTYPNGRYRSLSGTSMATPHVAGVAGLIRAANPDIVVAQARQILRDTAQEAGSFTQYGYGIVDAHAAVVAASGGSGG

SEQ ID NO: 1411 - DNA, 1239 bp, synthetic construct
  misc_feature 1..1239: note = Variant of serine peptidase from Bacillus sinesaloumensis
  source 1..1239: mol_type = other DNA
atggcagatcaagctagtcaagctaatggaaaccaggacgtcattgaaggcgagctgatcgtttcagtggaaccgaagaacggtaaacctgatgtgagcattcaaagtgcacaatccgtaacagggcaggaagacgtccttaaatcgaaaggctttacgatcgttgataccttgcatgtagaggatagcagcgtcaagccactcgtctcgaagaatttcaataagaaagtggtggagaagatgggactggtgtatcttgttcaatactctccggaccagtttaaaagttccaacattgcgaagaaagaactcagaaaagaattgatggatctgggctttaaagtccgctatataagcgaaaattacaagatgatggcgatcgaaggtacagccactcttcagggggtgcacccttgtcaagtttgggcgtataatatgattaaagctccggaagcgtgggctattacgagcggatccctgagcgttaaagtagcagtcctggatacagggatcgaccataatcacccatccttggccaacttcgtgaatactaatcttggccgctcgtttgttggaggaaacaccatggatgttcaaggtcatggcacacatgttgctggcacgattgcatcttatgggagtgtaagcggagtgatgcagagtgcgacactgatcccggtcaaagtgctcgataattctggcagcgggtccctttacggtattacgcagggcatattgtatgccgccgacatcgatgcggacgtcattaacatgtctctgggtggaggaggctataatcagagcatggatgaggctgttcaaacagcagttgctcagggaaccattgtagtagcagcgactggcaatgatggtgcatcgtcgatcagttatcctgctgcctacagcagcgtcattgcggtgggatctgtggactccaatcgtgttcgatcctcgttttctaactatggatctgggcttgaactgatggcaccgggcagcaacatctacagtacgtatcctaatggcagatatcgcagtttgagtggtacaagcatggctactccgcacgttgcgggcgtagctgggctcattcgcgcagccaacccagacatagtggtcgcgcaagcccgtcagattctgcgggataccgcgcaagaagcaggatcgttcacacagtacggctatggaatcgtcgatgctcatgccgccgttgttgctgcatccggtggtagcggcggc

SEQ ID NO: 1412 - protein, 413 aa, synthetic construct
  REGION 1..413: note = Variant of serine peptidase from Bacillus sinesaloumensis
MADQASQANGNQDVIEGELIVSVEPKNGKPDVSIQSAQSVTGQEDVLKSKGFTIVDTLHVEDSSVKPLVSKNFNKKVVEKMGLVYLVQYSPDQFKSSNIAKKELRKELMDLGFKVRYISENYKMMAIEGTATLQGVHPCQVWAYNMIKAPEAWAITSGSLSVKVAVLDTGIDHNHPSLANFVNTNLGRSFVGGNTMDVQGHGTHVAGTIASYGSVSGVMQSATLIPVKVLDNSGSGSLYGITQGILYAADIDADVINMSLGGGGYNQSMDEAVQTAVAQGTIVVAATGNDGASSISYPAAYSSVIAVGSVDSNRVRSSFSNYGSGLELMAPGSNIYSTYPNGRYRSLSGTSMATPHVAGVAGLIRAANPDIVVAQARQILRDTAQEAGSFTQYGYGIVDAHAAVVAASGGSGG

SEQ ID NO: 1413 - DNA, 1239 bp, synthetic construct
  misc_feature 1..1239: note = Variant of serine peptidase from Bacillus sinesaloumensis
  source 1..1239: mol_type = other DNA
atggcagatcaagctagtcaagctaatggaaaccaggacgtcattgaaggcgagctgatcgtttcagtggaaccgaagaacggtaaacctgatgtgagcattcaaagtgcacaatccgtaacagggcaggaagacgtccttaaatcgaaaggctttacgatcgttgataccttgcatgtagaggatagcagcgtcaagccactcgtctcgaagaatttcaataagaaagtggtggagaagatgggactggtgtatcttgttcaatactctccggaccagtttaaaagttccaacattgcgaagaaagaactcagaaaagaattgatggatctgggctttaaagtccgctatataagcgaaaattacaagatgatggcgatcgaaggtacagccactcttcagggggtgcacccttgtcaagtttgggcgtataatatgattaaagctccggaagcgtgggctattacgtctggatccctgagcgttaaagtagcagtcctggatacagggatcgaccataatcacccatccttggccaacttcgtgaatactaatcttggccgctcgtttgttggaggaaacaccatggatgttcaaggtcatggcacacatgttgctggcacgattgcatcttatgggagtgtaagcggagtgatgcagagtgcgacactgatcccggtcaaagtgctcgataattctggcagcgggtccctttacggtattacgcagggcatattgtatgccgccgacatcgatgtagacgtcattaacatgtctctgggtggaggaggctataatcagagcatggatgaggctgttcaaacagcagttgctcagggagttattgtagtagcagcgactggcaatgatggtgcatcgtcgatcagttatcctgctgcctacagcagcgtcattgcggtgggatctgtggactccaatcgtgttcgatcctcgttttctaactatggatctgggcttgaactgatggcaccgggcagcaacatctacagtacgtatcctaatggcagatatcgctcgttgagtggtacaagcatggctactccgcacgttgcgggcgtagctgggctcattcgcgcagccaacccagacatagtggtcgcgcaagcccgtcagattctgcgggataccgcgcaagaagcaggatcgttcacacagtacggctatggaatcgtcgatgctcatgccgccgttgttgctgcatccggtggtagcggcggc

SEQ ID NO: 1414 - protein, 413 aa, synthetic construct
  REGION 1..413: note = Variant of serine peptidase from Bacillus sinesaloumensis
MADQASQANGNQDVIEGELIVSVEPKNGKPDVSIQSAQSVTGQEDVLKSKGFTIVDTLHVEDSSVKPLVSKNFNKKVVEKMGLVYLVQYSPDQFKSSNIAKKELRKELMDLGFKVRYISENYKMMAIEGTATLQGVHPCQVWAYNMIKAPEAWAITSGSLSVKVAVLDTGIDHNHPSLANFVNTNLGRSFVGGNTMDVQGHGTHVAGTIASYGSVSGVMQSATLIPVKVLDNSGSGSLYGITQGILYAADIDVDVINMSLGGGGYNQSMDEAVQTAVAQGVIVVAATGNDGASSISYPAAYSSVIAVGSVDSNRVRSSFSNYGSGLELMAPGSNIYSTYPNGRYRSLSGTSMATPHVAGVAGLIRAANPDIVVAQARQILRDTAQEAGSFTQYGYGIVDAHAAVVAASGGSGG

SEQ ID NO: 1415 - DNA, 1239 bp, synthetic construct
  misc_feature 1..1239: note = Variant of serine peptidase from Bacillus sinesaloumensis
  source 1..1239: mol_type = other DNA
atggcagatcaagctagtcaagctaatggaaaccaggacgtcattgaaggcgagctgatcgtttcagtggaaccgaagaacggtaaacctgatgtgagcattcaaagtgcacaatccgtaacagggcaggaagacgtccttaaatcgaaaggctttacgatcgttgataccttgcatgtagaggatagcagcgtcaagccactcgtctcgaagaatttcaataagaaagtggtggagaagatgggactggtgtatcttgttcaatactctccggaccagtttaaaagttccaacattgcgaagaaagaactcagaaaagaattgatggatctgggctttaaagtccgctatataagcgaaaattacaagatgatggcgatcgaaggtacagccactcttcagggggtgcacccttgtcaagtttgggcgtataatatgattaaagctccggaagcgtgggctattacgggcggatccctgagcgttaaagtagcagtcctggatacagggatcgaccataatcacccatccttggccaacttcgtgaatactaatcttggccgctcgtttgttggaggaaacaccatggatgttcaaggtcatggcacacatgttgctggcacgattgcatcttatgggagtgtaagcggagtgatgcagagtgcgacactgatcccggtcaaagtgctcgataattctggcagcgggtccctttacggtattacgcagggcatattgtatgccgccgacatcgatgtagacgtcattaacatgtctctgggtggaggaggctataatcagggcatggatgaggctactcaaacagcagttgctcagggaaccattgtagtagcagcgactggcaatgatggtgcatcgtcgatcagttatcctgctgcctacagcagcgtcattgcggtgggatctgtggacagcaatcgtgttcgatcctcgttttctaactatggatctgggcttgaactgatggcaccgggcagcaacatctacagtacgtatcctaatggcagatatcgctcgttgagtggtacaagcatggctactccgcacgttgcgggcgtagctgggctcattcgcgcagccaacccagacatagtggtcgcgcaagcccgtcagattctgcgggataccgcgcaagaagcaggatcgttcacacagtacggctatggaatcgtcgatgctcatgccgccgttgttgctgcatccggtggttcgggcggc

SEQ ID NO: 1416 - protein, 413 aa, synthetic construct
  REGION 1..413: note = Variant of serine peptidase from Bacillus sinesaloumensis
MADQASQANGNQDVIEGELIVSVEPKNGKPDVSIQSAQSVTGQEDVLKSKGFTIVDTLHVEDSSVKPLVSKNFNKKVVEKMGLVYLVQYSPDQFKSSNIAKKELRKELMDLGFKVRYISENYKMMAIEGTATLQGVHPCQVWAYNMIKAPEAWAITGGSLSVKVAVLDTGIDHNHPSLANFVNTNLGRSFVGGNTMDVQGHGTHVAGTIASYGSVSGVMQSATLIPVKVLDNSGSGSLYGITQGILYAADIDVDVINMSLGGGGYNQGMDEATQTAVAQGTIVVAATGNDGASSISYPAAYSSVIAVGSVDSNRVRSSFSNYGSGLELMAPGSNIYSTYPNGRYRSLSGTSMATPHVAGVAGLIRAANPDIVVAQARQILRDTAQEAGSFTQYGYGIVDAHAAVVAASGGSGG

SEQ ID NO: 1417 - DNA, 1239 bp, synthetic construct
  misc_feature 1..1239: note = Variant of serine peptidase from Bacillus sinesaloumensis
  source 1..1239: mol_type = other DNA
atggcagatcaagctagtcaagctaatggaaaccaggacgtcattgaaggcgagctgatcgtttcagtggaaccgaagaacggtaaacctgatgtgagcattcaaagtgcacaatccgtaacagggcaggaagacgtccttaaatcgaaaggctttacgatcgttgataccttgcatgtagaggatagcagcgtcaagccactcgtctcgaagaatttcaataagaaagtggtggagaagatgggactggtgtatcttgttcaatactctccggaccagtttaaaagttccaacattgcgaagaaagaactcagaaaagaattgatggatctgggctttaaagtccgctatataagcgaaaattacaagatgatggcgatcgaaggtacagccactcttcagggggtgcaccctaaccaagtttgggcgtataatatgattaaagctccggaagcgtgggctattacgtctggatccctgagcgttaaagtagcagtcctggatacagggatcgaccataatcacccatccttggccaacttcgtgaatactaatcttggccgctcgtttgttggaggaaacaccatggatgttcaaggtcatggcacacatgttgctggcacgattgcatcttatgggagtgtaagcggagtgatgcagagtgcgacactgatcccggtcaaagtgctcgataattctggcagcgggtccctttacggtattacgcagggcatattgtatgccgccgacatcgatgtagacgtcattaacatgtctctgggtggaggaggctataatcagagcatggatgaggctgttcaaacagcagttgctcagggaaccattgtagtagcagcgactggcaatgatggtgcatcgtcgatcagttatcctgctgcctacagcagcgtcattgcggtgggatctgtggaccaaaatcgtgttcgatcctcgttttctaactatggatctgggcttgaactgatggcaccgggcagcaacatctacagtacgtatcctaatggcagatatcgctcgttgagtggtacaagcatggctactccgcacgttgcgggcgtagctgggctcattcgcgcagccaacccagacatagtggtcgcgcaagcccgtcagattctgcgggataccgcgcaagaagcaggatcgttcacacagtacggctatggaatcgtcgatgctcatgccgccgttgttgctgcatccggtggtacgggcggc

SEQ ID NO: 1418 - protein, 413 aa, synthetic construct
  REGION 1..413: note = Variant of serine peptidase from Bacillus sinesaloumensis
MADQASQANGNQDVIEGELIVSVEPKNGKPDVSIQSAQSVTGQEDVLKSKGFTIVDTLHVEDSSVKPLVSKNFNKKVVEKMGLVYLVQYSPDQFKSSNIAKKELRKELMDLGFKVRYISENYKMMAIEGTATLQGVHPNQVWAYNMIKAPEAWAITSGSLSVKVAVLDTGIDHNHPSLANFVNTNLGRSFVGGNTMDVQGHGTHVAGTIASYGSVSGVMQSATLIPVKVLDNSGSGSLYGITQGILYAADIDVDVINMSLGGGGYNQSMDEAVQTAVAQGTIVVAATGNDGASSISYPAAYSSVIAVGSVDQNRVRSSFSNYGSGLELMAPGSNIYSTYPNGRYRSLSGTSMATPHVAGVAGLIRAANPDIVVAQARQILRDTAQEAGSFTQYGYGIVDAHAAVVAASGGTGG

SEQ ID NO: 1419 - DNA, 1239 bp, synthetic construct
  misc_feature 1..1239: note = Variant of serine peptidase from Bacillus sinesaloumensis
  source 1..1239: mol_type = other DNA
atggcagatcaagctagtcaagctaatggaaaccaggacgtcattgaaggcgagctgatcgtttcagtggaaccgaagaacggtaaacctgatgtgagcattcaaagtgcacaatccgtaacagggcaggaagacgtccttaaatcgaaaggctttacgatcgttgataccttgcatgtagaggatagcagcgtcaagccactcgtctcgaagaatttcaataagaaagtggtggagaagatgggactggtgtatcttgttcaatactctccggaccagtttaaaagttccaacattgcgaagaaagaactcagaaaagaattgatggatctgggctttaaagtccgctatataagcgaaaattacaagatgatggcgatcgaaggtacagccactcttcagggggtgcacccttgtcaagtttgggcgtataatatgattaaagctccggaagcgtgggctattacgagcggatccctgagcgttaaagtagcagtcctggatacagggatcgaccataatcacccatccttggccaacttcgtgaatactaatcttggccgctcgtttgttggaggaaacaccatggatgttcaaggtcatggcacacatgttgctggcacgattgcatcttatgggagtgtaagcggagtgatgcagagtgcgacactgatcccggtcaaagtgctcgataattctggcagcgggtccctttacggtattacgcagggcatattgtatgccgccgacatcgatgcagacgtcattaacatgtctctgggtggaggaggctataatcagggcatggatgaggctactcaaacagcagttgctcagggaaccattgtagtagcagcgactggcaatgatggtgcatcgtcgatcagttatcctgctgcctacagcagcgtcattgcggtgggatctgtggacagcaatcgtgttcgatcctcgttttctaactatggatctgggcttgaactgatggcaccgggcagcaacatctacagtacgtatcctaatggcagatatcgcagtttgagtggtacaagcatggctactccgcacgttgcgggcgtagctgggctcattcgcgcagccaacccagacatagtggtcgcgcaagcccgtcagattctgcgggataccgcgcaagaagcaggatcgttcacacagtacggctatggaatcgtcgatgctcatgccgccgttgttgctgcatccggtggttcgggcggc

SEQ ID NO: 1420 - protein, 413 aa, synthetic construct
  REGION 1..413: note = Variant of serine peptidase from Bacillus sinesaloumensis
MADQASQANGNQDVIEGELIVSVEPKNGKPDVSIQSAQSVTGQEDVLKSKGFTIVDTLHVEDSSVKPLVSKNFNKKVVEKMGLVYLVQYSPDQFKSSNIAKKELRKELMDLGFKVRYISENYKMMAIEGTATLQGVHPCQVWAYNMIKAPEAWAITSGSLSVKVAVLDTGIDHNHPSLANFVNTNLGRSFVGGNTMDVQGHGTHVAGTIASYGSVSGVMQSATLIPVKVLDNSGSGSLYGITQGILYAADIDADVINMSLGGGGYNQGMDEATQTAVAQGTIVVAATGNDGASSISYPAAYSSVIAVGSVDSNRVRSSFSNYGSGLELMAPGSNIYSTYPNGRYRSLSGTSMATPHVAGVAGLIRAANPDIVVAQARQILRDTAQEAGSFTQYGYGIVDAHAAVVAASGGSGG

SEQ ID NO: 1421 - DNA, 1239 bp, synthetic construct
  misc_feature 1..1239: note = Variant of serine peptidase from Bacillus sinesaloumensis
  source 1..1239: mol_type = other DNA
atggcagatcaagctagtcaagctaatggaaaccaggacgtcattgaaggcgagctgatcgtttcagtggaaccgaagaacggtaaacctgatgtgagcattcaaagtgcacaatccgtaacagggcaggaagacgtccttaaatcgaaaggctttacgatcgttgataccttgcatgtagaggatagcagcgtcaagccactcgtctcgaagaatttcaataagaaagtggtggagaagatgggactggtgtatcttgttcaatactctccggaccagtttaaaagttccaacattgcgaagaaagaactcagaaaagaattgatggatctgggctttaaagtccgctatataagcgaaaattacaagatgatggcgatcgaaggtacagccactcttcagggggtgcaccctaaccaagtttgggcgtataatatgattaaagctccggaagcgtgggctattacgtctggatccctgagcgttaaagtagcagtcctggatacagggatcgaccataatcacccatccttggccaacttcgtgaatactaatcttggccgctcgtttgttggaggaaacaccatggatgttcaaggtcatggcacacatgttgctggcacgattgcatcttatgggagtgtaagcggagtgatgcagagtgcgacactgatcccggtcaaagtgctcgataattctggcagcgggtccctttacggtattacgcagggcatattgtatgccgccgacatcgatatcgacgtcattaacatgtctctgggtggaggaggctataatcagagcatggatgaggctgttcaaacagcagttgctcagggaaccattgtagtagcagcgactggcaatgatggtgcatcgtcgatcagttatcctgctgcctacagcagcgtcattgcggtgggatctgtggactccaatcgtgttcgatcctcgttttctaactatggatctgggcttgaactgatggcaccgggcagcaacatctacagtacgtatcctaatggcagatatcgcagtttgagtggtacaagcatggctactccgcacgttgcgggcgtagctgggctcattcgcgcagccaacccagacatagtggtcgcgcaagcccgtcagattctgcgggataccgcgcaagaagcaggatcgttcacacagtacggctatggaatcgtcgatgctcatgccgccgttgttgctgcatccggtggttcgggcggc

SEQ ID NO: 1422 - protein, 413 aa, synthetic construct
  REGION 1..413: note = Variant of serine peptidase from Bacillus sinesaloumensis
MADQASQANGNQDVIEGELIVSVEPKNGKPDVSIQSAQSVTGQEDVLKSKGFTIVDTLHVEDSSVKPLVSKNFNKKVVEKMGLVYLVQYSPDQFKSSNIAKKELRKELMDLGFKVRYISENYKMMAIEGTATLQGVHPNQVWAYNMIKAPEAWAITSGSLSVKVAVLDTGIDHNHPSLANFVNTNLGRSFVGGNTMDVQGHGTHVAGTIASYGSVSGVMQSATLIPVKVLDNSGSGSLYGITQGILYAADIDIDVINMSLGGGGYNQSMDEAVQTAVAQGTIVVAATGNDGASSISYPAAYSSVIAVGSVDSNRVRSSFSNYGSGLELMAPGSNIYSTYPNGRYRSLSGTSMATPHVAGVAGLIRAANPDIVVAQARQILRDTAQEAGSFTQYGYGIVDAHAAVVAASGGSGG

SEQ ID NO: 1423 - DNA, 1239 bp, synthetic construct
  misc_feature 1..1239: note = Variant of serine peptidase from Bacillus sinesaloumensis
  source 1..1239: mol_type = other DNA
atggcagatcaagctagtcaagctaatggaaaccaggacgtcattgaaggcgagctgatcgtttcagtggaaccgaagaacggtaaacctggtgtgagcattcaaagtgcacaatccgtaacagggcaggaagacgtccttaaatcgaaaggctttacgatcgttgataccttgcatgtagaggatagcagcgtcaagccactcgtctcgaagaatttcaataagaaagtggtggagaagatgggactggtgtatcttgttcaatactctccggaccagtttaaaagttccaacattgcgaagaaagaactcagaaaagaattgatggatctgggctttaaagtccgctatataagcgaaaattacaagatgatggcgatcgaaggtacagccactcttcagggggtgcacccttgtcaagtttgggcgtataatatgattaaagctccggaagcgtgggctattacgggcggatccctgagcgttaaagtagcagtcctggatacagggatcgaccataatcacccatccttggccaacttcgtgaatactaatcttggccgctcgtttgttggaggaaacaccatggatgttcaaggtcatggcacacatgttgctggcacgattgcatcttatgggagtgtaagcggagtgatgcagagtgcgacactgatcccggtcaaagtgctcgataattctggcagcgggtccctttacggtattacgcagggcatattgtatgccgccgacatcgatgcagacgtcattaacatgtctctgggtggaggaggctataatcagggcatggatgaggctactcaaacagcagttgctcagggaaccattgtagtagcagcgactggcaatgatggtgcatcgtcgatcagttatcctgctgcctacagcagcgtcattgcggtgggatctgtggaccaaaatcgtgttcgatcctcgttttctaactatggatctgggcttgaactgatggcaccgggcagcaacatctacagtacgtatcctaatggcagatatcgcacgttgagtggtacaagcatggctactccgcacgttgcgggcgtagctgggctcattcgcgcagccaacccagacatagtggtcgcgcaagcccgtcagattctgcgggataccgcgcaagaagcaggatcgttcacacagtacggctatggaatcgtcgatgctcatgccgccgttgttgctgcatccggtggttcgggcggc

SEQ ID NO: 1424 - protein, 413 aa, synthetic construct
  REGION 1..413: note = Variant of serine peptidase from Bacillus sinesaloumensis
MADQASQANGNQDVIEGELIVSVEPKNGKPGVSIQSAQSVTGQEDVLKSKGFTIVDTLHVEDSSVKPLVSKNFNKKVVEKMGLVYLVQYSPDQFKSSNIAKKELRKELMDLGFKVRYISENYKMMAIEGTATLQGVHPCQVWAYNMIKAPEAWAITGGSLSVKVAVLDTGIDHNHPSLANFVNTNLGRSFVGGNTMDVQGHGTHVAGTIASYGSVSGVMQSATLIPVKVLDNSGSGSLYGITQGILYAADIDADVINMSLGGGGYNQGMDEATQTAVAQGTIVVAATGNDGASSISYPAAYSSVIAVGSVDQNRVRSSFSNYGSGLELMAPGSNIYSTYPNGRYRTLSGTSMATPHVAGVAGLIRAANPDIVVAQARQILRDTAQEAGSFTQYGYGIVDAHAAVVAASGGSGG

SEQ ID NO: 1425 - DNA, 1239 bp, synthetic construct
  misc_feature 1..1239: note = Variant of serine peptidase from Bacillus sinesaloumensis
  source 1..1239: mol_type = other DNA
atggcagatcaagctagtcaagctaatggaaaccaggacgtcattgaaggcgagctgatcgtttcagtggaaccgaagaacggtaaacctgatgtgagcattcaaagtgcacaatccgtaacagggcaggaagacgtccttaaatcgaaaggctttacgatcgttgataccttgcatgtagaggatagcagcgtcaagccactcgtctcgaagaatttcaataagaaagtggtggagaagatgggactggtgtatcttgttcaatactctccggaccagtttaaaagttccaacattgcgaagaaagaactcagaaaagaattgatggatctgggctttaaagtccgctatataagcgaaaattacaagatgatggcgatcgaaggtacagccactcttcagggggtgcacccttgtcaagtttgggcgtataatatgattaaagctccggaagcgtgggctattacgggcggatccctgagcgttaaagtagcagtcctggatacagggatcgaccataatcacccatccttggccaacttcgtgaatactaatcttggccgctcgtttgttggaggaaacaccatggatgttcaaggtcatggcacacatgttgctggcacgattgcatcttatgggagtgtaagcggagtgatgcagagtgcgacactgatcccggtcaaagtgctcgataattctggcagcgggtccctttacggtattacgcagggcatattgtatgccgccgacatcgatgcagacgtcattaacatgtctctgggtggaggaggctataatcagggcatggatgaggctactcaaacagcagttgctcagggaaccattgtagtagcagcgactggcaatgatggtgcatcgtcgatcagttatcctgctgcctacagcagcgtcattgcggtgggatctgtggaccaaaatcgtgttcgatccaggttttctaactatggatctgggcttgaactgatggcaccgggcagcaacatctacagtacgtatcctaatggcagatatcgcacgttgagtggtacaagcatggctactccgcacgttgcgggcgtagctgggctcattcgcgcagccaacccagacatagtggtcgcgcaagcccgtcagattctgcgggataccgcgcaagaagcaggatcgttcacacagtacggctatggaatcgtcgatgctcatgccgccgttgttgctgcatccggtggttcgggcggc

SEQ ID NO: 1426 - protein, 413 aa, synthetic construct
  REGION 1..413: note = Variant of serine peptidase from Bacillus sinesaloumensis
MADQASQANGNQDVIEGELIVSVEPKNGKPDVSIQSAQSVTGQEDVLKSKGFTIVDTLHVEDSSVKPLVSKNFNKKVVEKMGLVYLVQYSPDQFKSSNIAKKELRKELMDLGFKVRYISENYKMMAIEGTATLQGVHPCQVWAYNMIKAPEAWAITGGSLSVKVAVLDTGIDHNHPSLANFVNTNLGRSFVGGNTMDVQGHGTHVAGTIASYGSVSGVMQSATLIPVKVLDNSGSGSLYGITQGILYAADIDADVINMSLGGGGYNQGMDEATQTAVAQGTIVVAATGNDGASSISYPAAYSSVIAVGSVDQNRVRSRFSNYGSGLELMAPGSNIYSTYPNGRYRTLSGTSMATPHVAGVAGLIRAANPDIVVAQARQILRDTAQEAGSFTQYGYGIVDAHAAVVAASGGSGG

SEQ ID NO: 1427 - DNA, 1239 bp, synthetic construct
  misc_feature 1..1239: note = Variant of serine peptidase from Bacillus sinesaloumensis
  source 1..1239: mol_type = other DNA
atggcagatcaagctagtcaagctaatggaaaccaggacgtcattgaaggcgagctgatcgtttcagtggaaccgaagaacggtaaacctgatgtgagcattcaaagtgcacaatccgtaacagggcaggaagacgtccttaaatcgaaaggctttacgatcgttgataccttgcatgtagaggatagcagcgtcaagccactcgtctcgaagaatttcaataagaaagtggtggagaagatgggactggtgtatcttgttcaatactctccggaccagtttaaaagttccaacattgcgaagaaagaactcagaaaagaattgatggatctgggctttaaagtccgctatataagcgaaaattacaagatgatggcgatcgaaggtacagccactcttcagggggtgcacccttgtcaagtttgggcgtataatatgattaaagctccggaagcgtgggctattacgggcggatccctgagcgttaaagtagcagtcctggatacagggatcgaccataatcacccatccttggccaacttcgtgaatactaatcttggccgctcgtttgttggaggaaacaccatggatgttcaaggtcatggcacacatgttgctggcacgattgcatcttatgggagtgtaagcggagtgatgcagagtgcgacactgatcccggtcaaagtgctcgataattctggcagcgggtccctttacggtattacgcagggcatattgtatgccgccgacatcgatgcagacgtcattaacatgtctctgggtggaggaggctataatcagggcatggatgaggctactcaaacagcagttgctcagggaaccattgtagtagcagcgactggcaatgatggtgcatcgtcgatccggtatcctgctgcctacagcagcgtcattgcggtgggatctgtggaccaaaatcgtgttcgatcctcgttttctaactatggatctgggcttgaactgatggcaccgggcagcaacatctacagtacgtatcctaatggcagatatcgcacgttgagtggtacaagcatggctactccgcacgttgcgggcgtagctgggctcattcgcgcagccaacccagacatagtggtcgcgcaagcccgtcagattctgcgggataccgcgcaagaagcaggatcgttcacacagtacggctatggaatcgtcgatgctcatgccgccgttgttgctgcatccggtggttcgggcggc

SEQ ID NO: 1428 - protein, 413 aa, synthetic construct
  REGION 1..413: note = Variant of serine peptidase from Bacillus sinesaloumensis
MADQASQANGNQDVIEGELIVSVEPKNGKPDVSIQSAQSVTGQEDVLKSKGFTIVDTLHVEDSSVKPLVSKNFNKKVVEKMGLVYLVQYSPDQFKSSNIAKKELRKELMDLGFKVRYISENYKMMAIEGTATLQGVHPCQVWAYNMIKAPEAWAITGGSLSVKVAVLDTGIDHNHPSLANFVNTNLGRSFVGGNTMDVQGHGTHVAGTIASYGSVSGVMQSATLIPVKVLDNSGSGSLYGITQGILYAADIDADVINMSLGGGGYNQGMDEATQTAVAQGTIVVAATGNDGASSIRYPAAYSSVIAVGSVDQNRVRSSFSNYGSGLELMAPGSNIYSTYPNGRYRTLSGTSMATPHVAGVAGLIRAANPDIVVAQARQILRDTAQEAGSFTQYGYGIVDAHAAVVAASGGSGG

SEQ ID NO: 1429 - DNA, 1239 bp, synthetic construct
  misc_feature 1..1239: note = Variant of serine peptidase from Bacillus sinesaloumensis
  source 1..1239: mol_type = other DNA
atggcagatcaagctagtcaagctaatggaaaccaggacgtcattgaaggcgagctgatcgtttcagtggaaccgaagaacggtaaacctgatgtgagcattcaaagtgcacaatccgtaacagggcaggaagacgtccttaaatcgaaaggctttacgatcgttgataccttgcatgtagaggatagcagcgtcaagccactcgtctcgaagaatttcaataagaaagtggtggagaagatgggactggtgtatcttgttcaatactctccggaccagtttaaaagttccaacattgcgaagaaagaactcagaaaagaattgatggatctgggctttaaagtccgctatataagcgaaaattacaagatgatggcgatcgaaggtacagccactcttcagggggtgcacccttgtcaagtttgggcgtataatatgattaaagctccggaagcgtgggctattacgggcggatccctgagcgttaaagtagcagtcctggatacagggatcgaccataatcacccatccttggccaacttcgtgaatactaatcttggccgctcgtttgttggaggaaacaccatggatgttcaaggtcatggcacacatgttgctggcacgattgcatcttatgggagtgtaagcggagtgatgcagagtgcgacactgatcccggtcaaagtgctcgataattctggcagcgggtccctttacggtattacgcagggcatattgtatgccgccgacatcgatgcagacgtcattaacatgtctctgggtggaggaggctataatcagggcatggatgaggctactcaaacagcagttgctcagggaaccattgtagtagcagcgactggcaatgatggtgcatcgtcgatcatgtatcctgctgcctacagcagcgtcattgcggtgggatctgtggaccaaaatcgtgttcgatcctcgttttctaactatggatctgggcttgaactgatggcaccgggcagcaacatctacagtacgtatcctaatggcagatatcgcacgttgagtggtacaagcatggctactccgcacgttgcgggcgtagctgggctcattcgcgcagccaacccagacatagtggtcgcgcaagcccgtcagattctgcgggataccgcgcaagaagcaggatcgttcacacagtacggctatggaatcgtcgatgctcatgccgccgttgttgctgcatccggtggttcgggcggc

SEQ ID NO: 1430 - protein, 413 aa, synthetic construct
  REGION 1..413: note = Variant of serine peptidase from Bacillus sinesaloumensis
MADQASQANGNQDVIEGELIVSVEPKNGKPDVSIQSAQSVTGQEDVLKSKGFTIVDTLHVEDSSVKPLVSKNFNKKVVEKMGLVYLVQYSPDQFKSSNIAKKELRKELMDLGFKVRYISENYKMMAIEGTATLQGVHPCQVWAYNMIKAPEAWAITGGSLSVKVAVLDTGIDHNHPSLANFVNTNLGRSFVGGNTMDVQGHGTHVAGTIASYGSVSGVMQSATLIPVKVLDNSGSGSLYGITQGILYAADIDADVINMSLGGGGYNQGMDEATQTAVAQGTIVVAATGNDGASSIMYPAAYSSVIAVGSVDQNRVRSSFSNYGSGLELMAPGSNIYSTYPNGRYRTLSGTSMATPHVAGVAGLIRAANPDIVVAQARQILRDTAQEAGSFTQYGYGIVDAHAAVVAASGGSGG

SEQ ID NO: 1431 - DNA, 1239 bp, synthetic construct
  misc_feature 1..1239: note = Variant of serine peptidase from Bacillus sinesaloumensis
  source 1..1239: mol_type = other DNA
atggcagatcaagctagtcaagctaatggaaaccaggacgtcattgaaggcgagctgatcgtttcagtggaaccgaagaacggtaaacctgatgtgagcattcaaagtgcacaatccgtaacagggcaggaagacgtccttaaatcgaaaggctttacgatcgttgataccttgcatgtagaggatagcagcgtcaagccactcgtctcgaagaatttcaataagaaagtggtggagaagatgggactggtgtatcttgttcaatactctccggaccagtttaaaagttccaacattgcgaagaaagaactcagaaaagaattgatggatctgggctttaaagtccgctatataagcgaaaattacaagatgatggcgatcgaaggtacagccactcttcagggggtgcacccttgtcaagtttgggcgtataatatgattaaagctccggaagcgtgggctattacgggcggatccctgagcgttaaagtagcagtcctggatacagggatcgaccataatcacccatccttggccaacttcgtgaatactaatcttggccgctcgtttgttggaggaaacaccatggatgttcaaggtcatggcacacatgttgctggcacgattgcatcttatgggagtgtaagcggagtgatgcagagtgcgacactgatcccggtcaaagtgctcgataattctggcagcgggtccctttacggtattacgcagggcatattgtatgccgccgacatcccggcagacgtcattaacatgtctctgggtggaggaggctataatcagggcatggatgaggctactcaaacagcagttgctcagggaaccattgtagtagcagcgactggcaatgatggtgcatcgtcgatcagttatcctgctgcctacagcagcgtcattgcggtgggatctgtggaccaaaatcgtgttcgatcctcgttttctaactatggatctgggcttgaactgatggcaccgggcagcaacatctacagtacgtatcctaatggcagatatcgcacgttgagtggtacaagcatggctactccgcacgttgcgggcgtagctgggctcattcgcgcagccaacccagacatagtggtcgcgcaagcccgtcagattctgcgggataccgcgcaagaagcaggatcgttcacacagtacggctatggaatcgtcgatgctcatgccgccgttgttgctgcatccggtggttcgggcggc

SEQ ID NO: 1432 - protein, 413 aa, synthetic construct
  REGION 1..413: note = Variant of serine peptidase from Bacillus sinesaloumensis
MADQASQANGNQDVIEGELIVSVEPKNGKPDVSIQSAQSVTGQEDVLKSKGFTIVDTLHVEDSSVKPLVSKNFNKKVVEKMGLVYLVQYSPDQFKSSNIAKKELRKELMDLGFKVRYISENYKMMAIEGTATLQGVHPCQVWAYNMIKAPEAWAITGGSLSVKVAVLDTGIDHNHPSLANFVNTNLGRSFVGGNTMDVQGHGTHVAGTIASYGSVSGVMQSATLIPVKVLDNSGSGSLYGITQGILYAADIPADVINMSLGGGGYNQGMDEATQTAVAQGTIVVAATGNDGASSISYPAAYSSVIAVGSVDQNRVRSSFSNYGSGLELMAPGSNIYSTYPNGRYRTLSGTSMATPHVAGVAGLIRAANPDIVVAQARQILRDTAQEAGSFTQYGYGIVDAHAAVVAASGGSGG

SEQ ID NO: 1433 - DNA, 1239 bp, synthetic construct
  misc_feature 1..1239: note = Variant of serine peptidase from Bacillus sinesaloumensis
  source 1..1239: mol_type = other DNA
atggcagatcaagctagtcaagctaatggaaaccaggacgtcattgaaggcgagctgatcgtttcagtggaaccgaagaacggtaaacctgatgtgagcattcaaagtgcacaatccgtaacagggcaggaagacgtccttaaatcgaaaggctttacgatcgttgataccttgcatgtagaggatagcagcgtcaagccactcgtctcgaagaatttcaataagaaagtggtggagaagatgggactggtgtatcttgttcaatactctccggaccagtttaaaagttccaacattgcgaagaaagaactcagaaaagaattgatggatctgggctttaaagtccgctatataagcgaaaattacaagatgatggcgatcgaaggtacagccactcttcagggggtgcacccttgtcaagtttgggcgtataatatgattaaagctccggaagcgtgggctattacgggcggatccctgagcgttaaagtagcagtcctggatacagggatcgaccataatcacccatccttggccaacttcgtgaatactaatcttggccgctcgtttgttggaggaaacaccatggatgttcaaggtcatggcacacatgttgctggcacgattgcatcttatgggagtgtaagcggagtgatgcagagtgcgacactgatcccggtcaaagtgctcgataattctggcagcgggtccctttacggtattacgcagggcatattgtatgccgccgacatcgatgcagacgtcattaacatgtctctgggtggaggaggctataatcagggcatggatgaggctactcaaacagcagttgctcagggaaccattgtagtagcagcgactggcaatgatggtgcatcgtcgatcagttatcctgctgcctacagcgcggtcattgcggtgggatctgtggaccaaaatcgtgttcgatcctcgttttctaactatggatctgggcttgaactgatggcaccgggcagcaacatctacagtacgtatcctaatggcagatatcgcacgttgagtggtacaagcatggctactccgcacgttgcgggcgtagctgggctcattcgcgcagccaacccagacatagtggtcgcgcaagcccgtcagattctgcgggataccgcgcaagaagcaggatcgttcacacagtacggctatggaatcgtcgatgctcatgccgccgttgttgctgcatccggtggttcgggcggc

SEQ ID NO: 1434 - protein, 413 aa, synthetic construct
  REGION 1..413: note = Variant of serine peptidase from Bacillus sinesaloumensis
MADQASQANGNQDVIEGELIVSVEPKNGKPDVSIQSAQSVTGQEDVLKSKGFTIVDTLHVEDSSVKPLVSKNFNKKVVEKMGLVYLVQYSPDQFKSSNIAKKELRKELMDLGFKVRYISENYKMMAIEGTATLQGVHPCQVWAYNMIKAPEAWAITGGSLSVKVAVLDTGIDHNHPSLANFVNTNLGRSFVGGNTMDVQGHGTHVAGTIASYGSVSGVMQSATLIPVKVLDNSGSGSLYGITQGILYAADIDADVINMSLGGGGYNQGMDEATQTAVAQGTIVVAATGNDGASSISYPAAYSAVIAVGSVDQNRVRSSFSNYGSGLELMAPGSNIYSTYPNGRYRTLSGTSMATPHVAGVAGLIRAANPDIVVAQARQILRDTAQEAGSFTQYGYGIVDAHAAVVAASGGSGG

SEQ ID NO: 1435 - DNA, 1239 bp, synthetic construct
  misc_feature 1..1239: note = Variant of serine peptidase from Bacillus sinesaloumensis
  source 1..1239: mol_type = other DNA
atggcagatcaagctagtcaagctaatggaaaccaggacgtcattgaaggcgagctgatcgtttcagtggaaccgaagaacggtaaacctgatgtgagcattcaaagtgcacaatccgtaacagggcaggaagacgtccttaaatcgaaaggctttacgatcgttgataccttgcatgtagaggatagcagcgtcaagccactcgtctcgaagaatttcaataagaaagtggtggagaagatgggactggtgtatcttgttcaatactctccggaccagtttaaaagttccaacattgcgaagaaagaactcagaaaagaattgatggatctgggctttaaagtccgctatataagcgaaaattacaagatgatggcgatcgaaggtacagccactcttcagggggtgcacccttgtcaagtttgggcgtataatatgattaaagctccggaagcgtgggctattacgggcggatccctgagcgttaaagtagcagtcctggatacagggatcgaccataatcacccatccttggccaacttcgtgaatactaatcttggccgctcgtttgttggaggaaacaccatggatgttcaaggtcatggcacacatgttgctggcacgattgcatcttatgggagtgtaagcggagtgatgcagagtgcgacactgatcccggtcaaagtgctcgataattctggcagcgggtccctttacggtattacgcagggcatattgtatgccgccgacatcgattgtgacgtcattaacatgtctctgggtggaggaggctataatcagggcatggatgaggctactcaaacagcagttgctcagggaaccattgtagtagcagcgactggcaatgatggtgcatcgtcgatcagttatcctgctgcctacagcagcgtcattgcggtgggatctgtggaccaaaatcgtgttcgatcctcgttttctaactatggatctgggcttgaactgatggcaccgggcagcaacatctacagtacgtatcctaatggcagatatcgcacgttgagtggtacaagcatggctactccgcacgttgcgggcgtagctgggctcattcgcgcagccaacccagacatagtggtcgcgcaagcccgtcagattctgcgggataccgcgcaagaagcaggatcgttcacacagtacggctatggaatcgtcgatgctcatgccgccgttgttgctgcatccggtggttcgggcggc

SEQ ID NO: 1436 - protein, 413 aa, synthetic construct
  REGION 1..413: note = Variant of serine peptidase from Bacillus sinesaloumensis
MADQASQANGNQDVIEGELIVSVEPKNGKPDVSIQSAQSVTGQEDVLKSKGFTIVDTLHVEDSSVKPLVSKNFNKKVVEKMGLVYLVQYSPDQFKSSNIAKKELRKELMDLGFKVRYISENYKMMAIEGTATLQGVHPCQVWAYNMIKAPEAWAITGGSLSVKVAVLDTGIDHNHPSLANFVNTNLGRSFVGGNTMDVQGHGTHVAGTIASYGSVSGVMQSATLIPVKVLDNSGSGSLYGITQGILYAADIDCDVINMSLGGGGYNQGMDEATQTAVAQGTIVVAATGNDGASSISYPAAYSSVIAVGSVDQNRVRSSFSNYGSGLELMAPGSNIYSTYPNGRYRTLSGTSMATPHVAGVAGLIRAANPDIVVAQARQILRDTAQEAGSFTQYGYGIVDAHAAVVAASGGSGG

SEQ ID NO: 1437 - DNA, 1239 bp, synthetic construct
  misc_feature 1..1239: note = Variant of serine peptidase from Bacillus sinesaloumensis
  source 1..1239: mol_type = other DNA
atggcagatcaagctagtcaagctaatggaaaccaggacgtcattgaaggcgagctgatcgtttcagtggaaccgaagaacggtaaacctgatgtgagcattcaaagtgcacaatccgtaacagggcaggaagacgtccttaaatcgaaaggctttacgatcgttgataccttgcatgtagaggatagcagcgtcaagccactcgtctcgaagaatttcaataagaaagtggtggagaagatgggactggtgtatcttgttcaatactctccggaccagtttaaaagttccaacattgcgaagaaagaactcagaaaagaattgatggatctgggctttaaagtccgctatataagcgaaaattacaagatgatggcgatcgaaggtacagccactcttcagggggtgcacccttgtcaagtttgggcgtataatatgattaaagctccggaagcgtgggctattacgggcggatccctgagcgttaaagtagcagtcctggatacagggatcgaccataatcacccatccttggccaacttcgtgaatactaatcttggccgctcgtttgttggaggaaacaccatggatgttcaaggtcatggcacacatgttgctggcacgattgcatcttatgggagtgtaagcggagtgatgcagagtgcgacactgatcccggtcaaagtgctcgataattctggcagcgggtccctttacggtattacgcagggcatattgtatgccgccgacatcgatgcagacgtcattaacatgtctctgggtggaggaggctataatcagggcatggatgaggctactcaaacagcagttgctcagggaaccattgtagtagcagcgactggcaatgatggtgcatcgtcgatcagttatcctgctgcctacagcagcgtcattgcggtgggatctgtggaccaaaatcgtgttcgatcctcgttttctaactatggatctgggcttgaactgatggcaccgggcagcaacatctacagtacgtatcctaatggcagatatcgcacgttgagtggtacaagcatggctactccgcacgttgcgggcgtagctgggctcattcgcgcagccaacccagacatagtggtcgcgcaagcccgtcagattctgcgggataccgcgcaagaagcaggatcgttcacacagtacggctatggaatcgtcgatgctcatgccgccgttgttgctgcatccggtggttcgggctgt

SEQ ID NO: 1438 - protein, 413 aa, synthetic construct
  REGION 1..413: note = Variant of serine peptidase from Bacillus sinesaloumensis
MADQASQANGNQDVIEGELIVSVEPKNGKPDVSIQSAQSVTGQEDVLKSKGFTIVDTLHVEDSSVKPLVSKNFNKKVVEKMGLVYLVQYSPDQFKSSNIAKKELRKELMDLGFKVRYISENYKMMAIEGTATLQGVHPCQVWAYNMIKAPEAWAITGGSLSVKVAVLDTGIDHNHPSLANFVNTNLGRSFVGGNTMDVQGHGTHVAGTIASYGSVSGVMQSATLIPVKVLDNSGSGSLYGITQGILYAADIDADVINMSLGGGGYNQGMDEATQTAVAQGTIVVAATGNDGASSISYPAAYSSVIAVGSVDQNRVRSSFSNYGSGLELMAPGSNIYSTYPNGRYRTLSGTSMATPHVAGVAGLIRAANPDIVVAQARQILRDTAQEAGSFTQYGYGIVDAHAAVVAASGGSGC

SEQ ID NO: 1439 - DNA, 1239 bp, synthetic construct
  misc_feature 1..1239: note = Variant of serine peptidase from Bacillus sinesaloumensis
  source 1..1239: mol_type = other DNA
atggcagatcaagctagtcaagctaatggaaaccaggacgtcattgaaggcgagctgatcgtttcagtggaaccgaagaacggtaaacctgatgtgagcattcaaagtgcacaatccgtaacagggcaggaagacgtccttaaatcgaaaggctttacgatcgttgataccttgcatgtagaggatagcagcgtcaagccactcgtctcgaagaatttcaataagaaagtggtggagaagatgggactggtgtatcttgttcaatactctccggaccagtttaaaagttccaacattgcgaagaaagaactcagaaaagaattgatggatctgggctttaaagtccgctatataagcgaaaattacaagatgatggcgatcgaaggtacagccactcttcagggggtgcacccttgtcaagtttgggcgtataatatgattaaagctccggaagcgtgggctattacgggcggatccctgagcgttaaagtagcagtcctggatacagggatcgaccataatcacccatccttggccaacttcgtgaatactaatcttggccgctcgtttgttggaggaaacaccatggatgttcaaggtcatggcacacatgttgctggcacgattgcatcttatgggagtgtaagcggagtgatgcagagtgcgacactgatcccggtcaaagtgctcgataattctggcagcgggtccctttacggtattacgcagggcatattgtatgccgccgacatcgatgcagacgtcattaacatgtctctgggtggaggaggctataatcagggcatggatgaggctactcaaacagcagttgctcagggaaccattgtagtagcagcgactggcaatgatggtgcatcgtcgatcagttatcctgctgcctacagcagcgtcattgcggtgggatctgtggaccaaaatcgtgttcgatcctcgttttctaactatggatctgggcttgaactgatggcaccgggcagcaacatctacagtacgtatcctaatggcagatatcgcacgttgagtggtacaagcatggctactccgcacgttgcgggcgtagctgggctcattcgcgcagccaacccagacatagtggtcgcgcaagcccgtcagattctgcgggataccgcgcaaccggcaggatcgttcacacagtacggctatggaatcgtcgatgctcatgccgccgttgttgctgcatccggtggttcgggcggc

SEQ ID NO: 1440 - protein, 413 aa, synthetic construct
  REGION 1..413: note = Variant of serine peptidase from Bacillus sinesaloumensis
MADQASQANGNQDVIEGELIVSVEPKNGKPDVSIQSAQSVTGQEDVLKSKGFTIVDTLHVEDSSVKPLVSKNFNKKVVEKMGLVYLVQYSPDQFKSSNIAKKELRKELMDLGFKVRYISENYKMMAIEGTATLQGVHPCQVWAYNMIKAPEAWAITGGSLSVKVAVLDTGIDHNHPSLANFVNTNLGRSFVGGNTMDVQGHGTHVAGTIASYGSVSGVMQSATLIPVKVLDNSGSGSLYGITQGILYAADIDADVINMSLGGGGYNQGMDEATQTAVAQGTIVVAATGNDGASSISYPAAYSSVIAVGSVDQNRVRSSFSNYGSGLELMAPGSNIYSTYPNGRYRTLSGTSMATPHVAGVAGLIRAANPDIVVAQARQILRDTAQPAGSFTQYGYGIVDAHAAVVAASGGSGG

SEQ ID NO: 1441 - DNA, 1239 bp, synthetic construct
  misc_feature 1..1239: note = Variant of serine peptidase from Bacillus sinesaloumensis
  source 1..1239: mol_type = other DNA
atggcagatcaagctagtcaagctaatggaaaccaggacgtcattgaaggcgagctgatcgtttcagtggaaccgaagaacggtaaacctgatgtgagcattcaaagtgcacaatccgtaacagggcaggaagacgtccttaaatcgaaaggctttacgatcgttgataccttgcatgtagaggatagcagcgtcaagccactcgtctcgaagaatttcaataagaaagtggtggagaagatgggactggtgtatcttgttcaatactctccggaccagtttaaaagttccaacattgcgaagaaagaactcagaaaagaattgatggatctgggctttaaagtccgctatataagcgaaaattacaagatgatggcgatcgaaggtacagccactcttcagggggtgcacccttgtcaagtttgggcgtataatatgattaaagctccggaagcgtgggctattacgggcggatccctgagcgttaaagtagcagtcctggatacagggatcgaccataatcacccatccttggccaacttcgtgaatactaatcttggccgctcgtttgttggaggaaacaccatggatgttcaaggtcatggcacacatgttgctggcacgattgcatcttatgggagtgtaagcggagtgatgcagagtgcgacactgatcccggtcaaagtgctcgataattctggcagcgggtccctttacggtattacgcagggcatattgtatgccgccgacatcgatgcagacgtcattaacatgtctctgggtggaggaggctataatcagggcatggatgaggctactcaaacagcagttgctcagggaaccattgtagtagcagcgactggcaatgatggtgcatcgtcgatcagttatcctgctgcctacagcagcgtcattgcggtgggatctgtggaccaaaatcgtgttcgatcctcgttttctaactatggatctgggcttgaactgatggcaccgggcagcaacatctacagtacgtatcctaatggcagatatcgcacgttgagtggtacaagcatggctactccgcacgttgcgggcgtagctgggctcattcgcgcagccaacccagacatagtggtcgcgcaagcccgtcagattctgcgggataccgcgcaagaagcaggatcgttcacacagtacggctatggaatcgtcgatgctcatgccgccgttgttgctgcatccggtggttcgggcgcg

SEQ ID NO: 1442 - protein, 413 aa, synthetic construct
  REGION 1..413: note = Variant of serine peptidase from Bacillus sinesaloumensis
MADQASQANGNQDVIEGELIVSVEPKNGKPDVSIQSAQSVTGQEDVLKSKGFTIVDTLHVEDSSVKPLVSKNFNKKVVEKMGLVYLVQYSPDQFKSSNIAKKELRKELMDLGFKVRYISENYKMMAIEGTATLQGVHPCQVWAYNMIKAPEAWAITGGSLSVKVAVLDTGIDHNHPSLANFVNTNLGRSFVGGNTMDVQGHGTHVAGTIASYGSVSGVMQSATLIPVKVLDNSGSGSLYGITQGILYAADIDADVINMSLGGGGYNQGMDEATQTAVAQGTIVVAATGNDGASSISYPAAYSSVIAVGSVDQNRVRSSFSNYGSGLELMAPGSNIYSTYPNGRYRTLSGTSMATPHVAGVAGLIRAANPDIVVAQARQILRDTAQEAGSFTQYGYGIVDAHAAVVAASGGSGA

SEQ ID NO: 1443 - DNA, 1239 bp, synthetic construct
  misc_feature 1..1239: note = Variant of serine peptidase from Bacillus sinesaloumensis
  source 1..1239: mol_type = other DNA
atggcagatcaagctagtcaagctaatggaaaccaggacgtcattgaaggcgagctgatcgtttcagtggaaccgaagaacggtaaacctgatgtgagcattcaaagtgcacaatccgtaacagggcaggaagacgtccttaaatcgaaaggctttacgatcgttgataccttgcatgtagaggatagcagcgtcaagccactcgtctcgaagaatttcaataagaaagtggtggagaagatgggactggtgtatcttgttcaatactctccggaccagtttaaaagttccaacattgcgaagaaagaactcagaaaagaattgatggatctgggctttaaagtccgctatataagcgaaaattacaagatgatggcgatcgaaggtacagccactcttcagggggtgcacccttgtcaagtttgggcgtataatatgattaaagctccggaagcgtgggctattacgggcggatccctgagcgttaaagtagcagtcctggatacagggatcgaccataatcacccatccttggccaacttcgtgaatactaatcttggccgctcgtttgttggaggaaacaccatggatgttcaaggtcatggcacacatgttgctggcacgattgcatcttatgggagtgtaagcggagtgatgcagagtgcgacactgatcccggtcaaagtgctcgataattctggcagcgggtccctttacggtattacgcagggcatattgtatgccgccgacatcgatgcagacgtcattaacatgtctctgggtggaggaggctataatcagggcatggatgaggctactcaaacagcagttgctcagggaaccattgtagtagcagcgactggcaatgatggtgcatcgtcgatcagttatcctgctgcctacagcagcgtcattgcggtgggatctgtggaccgtaatcgtgttcgatcctcgttttctaactatggatctgggcttgaactgatggcaccgggcagcaacatctacagtacgtatcctaatggcagatatcgcacgttgagtggtacaagcatggctactccgcacgttgcgggcgtagctgggctcattcgcgcagccaacccagacatagtggtcgcgcaagcccgtcagattctgcgggataccgcgcaagaagcaggatcgttcacacagtacggctatggaatcgtcgatgctcatgccgccgttgttgctgcatccggtggttcgggcggc

SEQ ID NO: 1444 - protein, 413 aa, synthetic construct
  REGION 1..413: note = Variant of serine peptidase from Bacillus sinesaloumensis
MADQASQANGNQDVIEGELIVSVEPKNGKPDVSIQSAQSVTGQEDVLKSKGFTIVDTLHVEDSSVKPLVSKNFNKKVVEKMGLVYLVQYSPDQFKSSNIAKKELRKELMDLGFKVRYISENYKMMAIEGTATLQGVHPCQVWAYNMIKAPEAWAITGGSLSVKVAVLDTGIDHNHPSLANFVNTNLGRSFVGGNTMDVQGHGTHVAGTIASYGSVSGVMQSATLIPVKVLDNSGSGSLYGITQGILYAADIDADVINMSLGGGGYNQGMDEATQTAVAQGTIVVAATGNDGASSISYPAAYSSVIAVGSVDRNRVRSSFSNYGSGLELMAPGSNIYSTYPNGRYRTLSGTSMATPHVAGVAGLIRAANPDIVVAQARQILRDTAQEAGSFTQYGYGIVDAHAAVVAASGGSGG

SEQ ID NO: 1445 - DNA, 1239 bp, synthetic construct
  misc_feature 1..1239: note = Variant of serine peptidase from Bacillus sinesaloumensis
  source 1..1239: mol_type = other DNA
atggcagatcaagctagtcaagctaatggaaaccaggacgtcattgaaggcgagctgatcgtttcagtggaaccgaagaacggtaaacctgatgtgagcattcaaagtgcacaatccgtaacagggcaggaagacgtccttaaatcgaaaggctttacgatcgttgataccttgcatgtagaggatagcagcgtcaagccactcgtctcgaagaatttcaataagaaagtggtggagaagatgggactggtgtatcttgttcaatactctccggaccagtttaaaagttccaacattgcgaagaaagaactcagaaaagaattgatggatctgggctttaaagtccgctatataagcgaaaattacaagatgatggcgatcgaaggtacagccactcttcagggggtgcacccttgtcaagtttgggcgtataatatgattaaagctccggaagcgtgggctattacgggcggatccctgagcgttaaagtagcagtcctggatacagggatcgaccataatcacccatccttggccaacttcgtgaatactaatcttggccgctcgtttgttggaggaaacaccatggatgttcaaggtcatggcacacatgttgctggcacgattgcatcttatgggagtgtaagcggagtgatgcagagtgcgacactgatcccggtcaaagtgctcgataattctggccgtgggtccctttacggtattacgcagggcatattgtatgccgccgacatcgatgcagacgtcattaacatgtctctgggtggaggaggctataatcagggcatggatgaggctactcaaacagcagttgctcagggaaccattgtagtagcagcgactggcaatgatggtgcatcgtcgatcagttatcctgctgcctacagcagcgtcattgcggtgggatctgtggaccaaaatcgtgttcgatcctcgttttctaactatggatctgggcttgaactgatggcaccgggcagcaacatctacagtacgtatcctaatggcagatatcgcacgttgagtggtacaagcatggctactccgcacgttgcgggcgtagctgggctcattcgcgcagccaacccagacatagtggtcgcgcaagcccgtcagattctgcgggataccgcgcaagaagcaggatcgttcacacagtacggctatggaatcgtcgatgctcatgccgccgttgttgctgcatccggtggttcgggcggc

SEQ ID NO: 1446 - protein, 413 aa, synthetic construct
  REGION 1..413: note = Variant of serine peptidase from Bacillus sinesaloumensis
MADQASQANGNQDVIEGELIVSVEPKNGKPDVSIQSAQSVTGQEDVLKSKGFTIVDTLHVEDSSVKPLVSKNFNKKVVEKMGLVYLVQYSPDQFKSSNIAKKELRKELMDLGFKVRYISENYKMMAIEGTATLQGVHPCQVWAYNMIKAPEAWAITGGSLSVKVAVLDTGIDHNHPSLANFVNTNLGRSFVGGNTMDVQGHGTHVAGTIASYGSVSGVMQSATLIPVKVLDNSGRGSLYGITQGILYAADIDADVINMSLGGGGYNQGMDEATQTAVAQGTIVVAATGNDGASSISYPAAYSSVIAVGSVDQNRVRSSFSNYGSGLELMAPGSNIYSTYPNGRYRTLSGTSMATPHVAGVAGLIRAANPDIVVAQARQILRDTAQEAGSFTQYGYGIVDAHAAVVAASGGSGG

SEQ ID NO: 1447 - DNA, 1239 bp, synthetic construct
  misc_feature 1..1239: note = Variant of serine peptidase from Bacillus sinesaloumensis
  source 1..1239: mol_type = other DNA
atggcagatcaagctagtcaagctaatggaaaccaggacgtcattgaaggcgagctgatcgtttcagtggaaccgaagaacggtaaacctgatgtgagcattcaaagtgcacaatccgtaacagggcaggaagacgtccttaaatcgaaaggctttacgatcgttgataccttgcatgtagaggatagcagcgtcaagccactcgtctcgaagaatttcaataagaaagtggtggagaagatgggactggtgtatcttgttcaatactctccggaccagtttaaaagttccaacattgcgaagaaagaactcagaaaagaattgatggatctgggctttaaagtccgctatataagcgaaaattacaagatgatggcgatcgaaggtacagccactcttcagggggtgcacccttgtcaagtttgggcgtataatatgattaaagctccggaagcgtgggctattacgggcggatccctgagcgttaaagtagcagtcctggatacagggatcgaccataatcacccatccttggccaacttcgtgaatactaatcttggccgctcgtttgttggaggaaacaccatggatgttcaaggtcatggcacacatgttgctggcacgattgcatcttatgggagtgtaagcggagtgatgcagagtgcgacactgatcccggtcaaagtgctcgataattctggcagcgggtccctttacggtattacgcagggcatattgtatgccgccgacatcgatgcagacgtcattaacatgtctctgggtggaggaggctataatcagggcatggatgaggctactcaaacagcagttgctcagggaaccattgtagtagcagcgactggcaatgatggtgcatcgtcgatcagttatcctgctgcctacagcagcgtcattgcggtgggatctgtggaccaaaatcgtgttcgatcctcgttttctaactatggatctgggcttgaactgatggcaccgggcagcaacatctacagtacgtatcctaatggcagatatcgcacgttgagtggtacaagcatggctactccgcacgttgcgggcgtagctgggctcattcgcgcagccaacccagacatagtggtcgcgcaagcccgtcagattctgcgggataccgcgcaagaagcaggatcgttcacacagtacggctatggaatcgtcgatgctcatgccgccgttgttgctgcatccggtggttcgcctggc

SEQ ID NO: 1448 - protein, 413 aa, synthetic construct
  REGION 1..413: note = Variant of serine peptidase from Bacillus sinesaloumensis
MADQASQANGNQDVIEGELIVSVEPKNGKPDVSIQSAQSVTGQEDVLKSKGFTIVDTLHVEDSSVKPLVSKNFNKKVVEKMGLVYLVQYSPDQFKSSNIAKKELRKELMDLGFKVRYISENYKMMAIEGTATLQGVHPCQVWAYNMIKAPEAWAITGGSLSVKVAVLDTGIDHNHPSLANFVNTNLGRSFVGGNTMDVQGHGTHVAGTIASYGSVSGVMQSATLIPVKVLDNSGSGSLYGITQGILYAADIDADVINMSLGGGGYNQGMDEATQTAVAQGTIVVAATGNDGASSISYPAAYSSVIAVGSVDQNRVRSSFSNYGSGLELMAPGSNIYSTYPNGRYRTLSGTSMATPHVAGVAGLIRAANPDIVVAQARQILRDTAQEAGSFTQYGYGIVDAHAAVVAASGGSPG

SEQ ID NO: 1449 - DNA, 1239 bp, synthetic construct
  misc_feature 1..1239: note = Variant of serine peptidase from Bacillus sinesaloumensis
  source 1..1239: mol_type = other DNA
atggcagatcaagctagtcaagctaatggaaaccaggacgtcattgaaggcgagctgatcgtttcagtggaaccgaagaacggtaaacctgatgtgagcattcaaagtgcacaatccgtaacagggcaggaagacgtccttaaatcgaaaggctttacgatcgttgataccttgcatgtagaggatagcagcgtcaagccactcgtctcgaagaatttcaataagaaagtggtggagaagatgggactggtgtatcttgttcaatactctccggaccagtttaaaagttccaacattgcgaagaaagaactcagaaaagaattgatggatctgggctttaaagtccgctatataagcgaaaattacaagatgatggcgatcgaaggtacagccactcttcagggggtgcacccttgtcaagtttgggcgtataatatgattaaagctccggaagcgtgggctattacgggcggatccctgagcgttaaagtagcagtcctggatacagggatcgaccataatcacccatccttggccaacttcgtgaatactaatcttggccgctcgtttgttggaggaaacaccatggatgttcaaggtcatggcacacatgttgctggcacgattgcatcttatgggagtgtaagcggagtgatgcagagtgcgacactgatcccggtcaaagtgctcgataattctggcagcgggtccctttacggtattacgcagggcatattgtatgccgccgacatcgatgcagacgtcattaacatgtctctgggtggaggaggctataatcagggcatggatgaggctactcaaacagcagttgctcagggaaccattgtagtagcagcgactggcaatgatggtgcatcgtcgatcagttatcctgctgcctacagcagcgtcattgcggtgggatctgtggaccaaaatcgtgttcgatcctcgttttctaactatggatctgggcttgaactgatggcaccgggcagcaacatctacagtacgtatcctaatgcgagatatcgcacgttgagtggtacaagcatggctactccgcacgttgcgggcgtagctgggctcattcgcgcagccaacccagacatagtggtcgcgcaagcccgtcagattctgcgggataccgcgcaagaagcaggatcgttcacacagtacggctatggaatcgtcgatgctcatgccgccgttgttgctgcatccggtggttcgggcggc

SEQ ID NO: 1450 - protein, 413 aa, synthetic construct
  REGION 1..413: note = Variant of serine peptidase from Bacillus sinesaloumensis
MADQASQANGNQDVIEGELIVSVEPKNGKPDVSIQSAQSVTGQEDVLKSKGFTIVDTLHVEDSSVKPLVSKNFNKKVVEKMGLVYLVQYSPDQFKSSNIAKKELRKELMDLGFKVRYISENYKMMAIEGTATLQGVHPCQVWAYNMIKAPEAWAITGGSLSVKVAVLDTGIDHNHPSLANFVNTNLGRSFVGGNTMDVQGHGTHVAGTIASYGSVSGVMQSATLIPVKVLDNSGSGSLYGITQGILYAADIDADVINMSLGGGGYNQGMDEATQTAVAQGTIVVAATGNDGASSISYPAAYSSVIAVGSVDQNRVRSSFSNYGSGLELMAPGSNIYSTYPNARYRTLSGTSMATPHVAGVAGLIRAANPDIVVAQARQILRDTAQEAGSFTQYGYGIVDAHAAVVAASGGSGG

SEQ ID NO: 1451 - DNA, 1239 bp, synthetic construct
  misc_feature 1..1239: note = Variant of serine peptidase from Bacillus sinesaloumensis
  source 1..1239: mol_type = other DNA
atggcagatcaagctagtcaagctaatggaaaccaggacgtcattgaaggcgagctgatcgtttcagtggaaccgaagaacggtaaacctgatgtgagcattcaaagtgcacaatccgtaacagggcaggaagacgtccttaaatcgaaaggctttacgatcgttgataccttgcatgtagaggatagcagcgtcaagccactcgtctcgaagaatttcaataagaaagtggtggagaagatgggactggtgtatcttgttcaatactctccggaccagtttaaaagttccaacattgcgaagaaagaactcagaaaagaattgatggatctgggctttaaagtccgctatataagcgaaaattacaagatgatggcgatcgaaggtacagccactcttcagggggtgcacccttgtcaagtttgggcgtataatatgattaaagctccggaagcgtgggctattacgggcggatccctgagcgttaaagtagcagtcctggatacagggatcgaccataatcacccatccttggccaacttcgtgaatactaatcttggccgctcgtttgttggaggaaacaccatggatgttcaaggtcatggcacacatgttgctggcacgattgcatcttatgggagtgtaagcggagtgatgcagagtgcgacactgatcccggtcaaagtgctcgataattctggcagcgggtccctttacggtattacgcagggcatattgtatgccgccgacatcgatgcagacgtcattaacatgtctctgggtggaggaggctataatcagggcatggatgaggctactcaaacagcagttgctcagggaaccattgtagtagcagcgactggcaatgatggtgcatcgtcgatcagttatcctgctgcctacagcagcgtcattgcggtgggatctgtggaccaaaatcgtgttcgatcctcgttttctaactatggatctgggcttgaactgatggcaccgggcagcaacatctacagtacgtatcctaatggcagatatcgcacgttgagtggtacaagcatggctactccgcacgttgcgggcgtagctgggctcattcgcgcagccaacccagacatagtggtcgcgcaagcccgtcagattctgcgggataccgcgcaagaagcaggatcgttcacacagtacggctatggaatcgtcgatgctcatgccgccgttgttgctgcatccggtggttcgggctct

SEQ ID NO: 1452 - protein, 413 aa, synthetic construct
  REGION 1..413: note = Variant of serine peptidase from Bacillus sinesaloumensis
MADQASQANGNQDVIEGELIVSVEPKNGKPDVSIQSAQSVTGQEDVLKSKGFTIVDTLHVEDSSVKPLVSKNFNKKVVEKMGLVYLVQYSPDQFKSSNIAKKELRKELMDLGFKVRYISENYKMMAIEGTATLQGVHPCQVWAYNMIKAPEAWAITGGSLSVKVAVLDTGIDHNHPSLANFVNTNLGRSFVGGNTMDVQGHGTHVAGTIASYGSVSGVMQSATLIPVKVLDNSGSGSLYGITQGILYAADIDADVINMSLGGGGYNQGMDEATQTAVAQGTIVVAATGNDGASSISYPAAYSSVIAVGSVDQNRVRSSFSNYGSGLELMAPGSNIYSTYPNGRYRTLSGTSMATPHVAGVAGLIRAANPDIVVAQARQILRDTAQEAGSFTQYGYGIVDAHAAVVAASGGSGS

SEQ ID NO: 1453 - DNA, 1239 bp, synthetic construct
  misc_feature 1..1239: note = Variant of serine peptidase from Bacillus sinesaloumensis
  source 1..1239: mol_type = other DNA
atggcagatcaagctagtcaagctaatggaaaccaggacgtcattgaaggcgagctgatcgtttcagtggaaccgaagaacggtaaacctgatgtgagcattcaaagtgcacaatccgtaacagggcaggaagacgtccttaaatcgaaaggctttacgatcgttgataccttgcatgtagaggatagcagcgtcaagccactcgtctcgaagaatttcaataagaaagtggtggagaagatgggactggtgtatcttgttcaatactctccggaccagtttaaaagttccaacattgcgaagaaagaactcagaaaagaattgatggatctgggctttaaagtccgctatataagcgaaaattacaagatgatggcgatcgaaggtacagccactcttcagggggtgcacccttgtcaagtttgggcgtataatatgattaaagctccggaagcgtgggctattacgggcggatccctgagcgttaaagtagcagtcctggatacagggatcgaccataatcacccatccttggccaacttcgtgaatactaatcttggccgctcgtttgttggaggaaacaccatggatgttcaaggtcatggcacacatgttgctggcacgattgcatcttatgggagtgtaagcggagtgatgcagagtgcgacactgatcccggtcaaagtgctcgataattctggcagcgggtccctttacggtattacgcagggcatattgtatgccgccgacatcgatgcagacgtcattaacatgtctctgggtggaggaggctataatcagggcatggatgaggctactcaaacagcagttgctcagggaaccattgtagtagcagcgactggcaatgatggtgcatcgtcgatcagttatcctgctgcctacccgagcgtcattgcggtgggatctgtggaccaaaatcgtgttcgatcctcgttttctaactatggatctgggcttgaactgatggcaccgggcagcaacatctacagtacgtatcctaatggcagatatcgcacgttgagtggtacaagcatggctactccgcacgttgcgggcgtagctgggctcattcgcgcagccaacccagacatagtggtcgcgcaagcccgtcagattctgcgggataccgcgcaagaagcaggatcgttcacacagtacggctatggaatcgtcgatgctcatgccgccgttgttgctgcatccggtggttcgggcggc

SEQ ID NO: 1454 - protein, 413 aa, synthetic construct
  REGION 1..413: note = Variant of serine peptidase from Bacillus sinesaloumensis
MADQASQANGNQDVIEGELIVSVEPKNGKPDVSIQSAQSVTGQEDVLKSKGFTIVDTLHVEDSSVKPLVSKNFNKKVVEKMGLVYLVQYSPDQFKSSNIAKKELRKELMDLGFKVRYISENYKMMAIEGTATLQGVHPCQVWAYNMIKAPEAWAITGGSLSVKVAVLDTGIDHNHPSLANFVNTNLGRSFVGGNTMDVQGHGTHVAGTIASYGSVSGVMQSATLIPVKVLDNSGSGSLYGITQGILYAADIDADVINMSLGGGGYNQGMDEATQTAVAQGTIVVAATGNDGASSISYPAAYPSVIAVGSVDQNRVRSSFSNYGSGLELMAPGSNIYSTYPNGRYRTLSGTSMATPHVAGVAGLIRAANPDIVVAQARQILRDTAQEAGSFTQYGYGIVDAHAAVVAASGGSGG

SEQ ID NO: 1455 - DNA, 1239 bp, synthetic construct
  misc_feature 1..1239: note = Variant of serine peptidase from Bacillus sinesaloumensis
  source 1..1239: mol_type = other DNA
atggcagatcaagctagtcaagctaatggaaaccaggacgtcattgaaggcgagctgatcgtttcagtggaaccgaagaacggtaaacctgatgtgagcattcaaagtgcacaatccgtaacagggcaggaagacgtccttaaatcgaaaggctttacgatcgttgataccttgcatgtagaggatagcagcgtcaagccactcgtctcgaagaatttcaataagaaagtggtggagaagatgggactggtgtatcttgttcaatactctccggaccagtttaaaagttccaacattgcgaagaaagaactcagaaaagaattgatggatctgggctttaaagtccgctatataagcgaaaattacaagatgatggcgatcgaaggtacagccactcttcagggggtgcacccttgtcaagtttgggcgtataatatgattaaagctccggaagcgtgggctattacgggcggatccctgagcgttaaagtagcagtcctggatacagggatcgaccataatcacccatccttggccaacttcgtgaatactaatcttggccgctcgtttgttggaggaaacaccatggatgttcaaggtcatggcacacatgttgctggcacgattgcatcttatgggagtgtaagcggagtgatgcagagtgcgacactgatcccggtcaaagtgctcgataattctggcagcgggtccctttacggtattacgcagggcatattgtatgccgccgacatcgatgcagacgtcattaacatgtctctgggtggaggaggctataatcagggcatggatgaggctactcaaacagcagttgctcagggaaccattgtagtagcagcgactggcaatgatggtgcatcgtcgatcagttatcctgctgcctacagcagcgtcattgcggtgggatctgtggaccaaaatcgtgttcgatcctcgttttctaactatggatctgggcttgaactgatggcaccgggcagcaacatctacagtacgtatcctaatggcagatatcgcacgttgagtggtacaagcatggctactccgcacgttgcgggcgtagctgggctcattcgcgcagccaacccagaccttgtggtcgcgcaagcccgtcagattctgcgggataccgcgcaagaagcaggatcgttcacacagtacggctatggaatcgtcgatgctcatgccgccgttgttgctgcatccggtggttcgggcggc

SEQ ID NO: 1456 - protein, 413 aa, synthetic construct
  REGION 1..413: note = Variant of serine peptidase from Bacillus sinesaloumensis
MADQASQANGNQDVIEGELIVSVEPKNGKPDVSIQSAQSVTGQEDVLKSKGFTIVDTLHVEDSSVKPLVSKNFNKKVVEKMGLVYLVQYSPDQFKSSNIAKKELRKELMDLGFKVRYISENYKMMAIEGTATLQGVHPCQVWAYNMIKAPEAWAITGGSLSVKVAVLDTGIDHNHPSLANFVNTNLGRSFVGGNTMDVQGHGTHVAGTIASYGSVSGVMQSATLIPVKVLDNSGSGSLYGITQGILYAADIDADVINMSLGGGGYNQGMDEATQTAVAQGTIVVAATGNDGASSISYPAAYSSVIAVGSVDQNRVRSSFSNYGSGLELMAPGSNIYSTYPNGRYRTLSGTSMATPHVAGVAGLIRAANPDLVVAQARQILRDTAQEAGSFTQYGYGIVDAHAAVVAASGGSGG

SEQ ID NO: 1457 - DNA, 1239 bp, synthetic construct
  misc_feature 1..1239: note = Variant of serine peptidase from Bacillus sinesaloumensis
  source 1..1239: mol_type = other DNA
atggcagatcaagctagtcaagctaatggaaaccaggacgtcattgaaggcgagctgatcgtttcagtggaaccgaagaacggtaaacctgatgtgagcattcaaagtgcacaatccgtaacagggcaggaagacgtccttaaatcgaaaggctttacgatcgttgataccttgcatgtagaggatagcagcgtcaagccactcgtctcgaagaatttcaataagaaagtggtggagaagatgggactggtgtatcttgttcaatactctccggaccagtttaaaagttccaacattgcgaagaaagaactcagaaaagaattgatggatctgggctttaaagtccgctatataagcgaaaattacaagatgatggcgatcgaaggtacagccactcttcagggggtgcacccttgtcaagtttgggcgtataatatgattaaagctccggaagcgtgggctattacgggcggatccctgagcgttaaagtagcagtcctggatacagggatcgaccataatcacccatccttggccaacttcgtgaatactaatcttggccgctcgtttgttggaggaaacaccatggatgttcaaggtcatggcacacatgttgctggcacgattgcatcttatgggagtgtaagcggagtgatgcagagtgcgacactgatcccggtcaaagtgctcgataattctggcagcgggtccctttacggtattacgcagggcatattgtatgccgccgacatcgatgcagacgtcattaacatgtctctgggtggaggaggctataatcagggcatggatgaggctactcaaacagcagttgctcagggaaccattgtagtagcagcgactggcaatgatggtgcatcgtcgatcagttatcctgctgcctacagcagcgtcattgcggtgggatctgtggaccaaaatcgtgttcgatcctcgttttctaactatggatctgggcttgaactgatggcaccgggcagcaacatctacagtacgtatcctaatggcagatatcgcacgttgagtggtacaagcatggctactccgcacgttgcgggcgtagctgggctcattcgcgcagccaacccagacatagtggtcgcgcaagcccgtcagattctgcgggataccgcgcaagaagcaggatcgttcacacagtacggctatggaatcgtcgatgctcatgccgccgttctggctgcatccggtggttcgggcggc

SEQ ID NO: 1458 - protein, 413 aa, synthetic construct
  REGION 1..413: note = Variant of serine peptidase from Bacillus sinesaloumensis
MADQASQANGNQDVIEGELIVSVEPKNGKPDVSIQSAQSVTGQEDVLKSKGFTIVDTLHVEDSSVKPLVSKNFNKKVVEKMGLVYLVQYSPDQFKSSNIAKKELRKELMDLGFKVRYISENYKMMAIEGTATLQGVHPCQVWAYNMIKAPEAWAITGGSLSVKVAVLDTGIDHNHPSLANFVNTNLGRSFVGGNTMDVQGHGTHVAGTIASYGSVSGVMQSATLIPVKVLDNSGSGSLYGITQGILYAADIDADVINMSLGGGGYNQGMDEATQTAVAQGTIVVAATGNDGASSISYPAAYSSVIAVGSVDQNRVRSSFSNYGSGLELMAPGSNIYSTYPNGRYRTLSGTSMATPHVAGVAGLIRAANPDIVVAQARQILRDTAQEAGSFTQYGYGIVDAHAAVLAASGGSGG

SEQ ID NO: 1459 - DNA, 1239 bp, synthetic construct
  misc_feature 1..1239: note = Variant of serine peptidase from Bacillus sinesaloumensis
  source 1..1239: mol_type = other DNA
atggcagatcaagctagtcaagctaatggaaaccaggacgtcattgaaggcgagctgatcgtttcagtggaaccgaagaacggtaaacctgatgtgagcattcaaagtgcacaatccgtaacagggcaggaagacgtccttaaatcgaaaggctttacgatcgttgataccttgcatgtagaggatagcagcgtcaagccactcgtctcgaagaatttcaataagaaagtggtggagaagatgggactggtgtatcttgttcaatactctccggaccagtttaaaagttccaacattgcgaagaaagaactcagaaaagaattgatggatctgggctttaaagtccgctatataagcgaaaattacaagatgatggcgatcgaaggtacagccactcttcagggggtgcacccttgtcaagtttgggcgtataatatgattaaagctccggaagcgtgggctattacgggcggatccctgagcgttaaagtagcagtcctggatacagggatcgaccataatcacccatccttggccaacttcgtgaatactaatcttggccgctcgtttgttggaggaaacaccatggatgttcaaggtcatggcacacatgttgctggcacgattgcatcttatgggagtgtaagcggagtgatgcagagtgcgacactgatcccggtcaaagtgctcgataattctggcagcgggtccctttacggtattacgcagggcatattgtatgccgccgacatcgatgcagacgtcattaacatgtctctgggtggaggaggctataatcagggcatggatgaggctactcaaacagcagttgctcagggaaccattgtagtagcagcgactggcaatgatggtgcatcgtcgatcagttatcctgctgcctacagcagcgtcattgcggtgggatctgtggacgcgaatcgtgttcgatcctcgttttctaactatggatctgggcttgaactgatggcaccgggcagcaacatctacagtacgtatcctaatggcagatatcgcacgttgagtggtacaagcatggctactccgcacgttgcgggcgtagctgggctcattcgcgcagccaacccagacatagtggtcgcgcaagcccgtcagattctgcgggataccgcgcaagaagcaggatcgttcacacagtacggctatggaatcgtcgatgctcatgccgccgttgttgctgcatccggtggttcgggcggc

SEQ ID NO: 1460 - protein, 413 aa, synthetic construct
  REGION 1..413: note = Variant of serine peptidase from Bacillus sinesaloumensis
MADQASQANGNQDVIEGELIVSVEPKNGKPDVSIQSAQSVTGQEDVLKSKGFTIVDTLHVEDSSVKPLVSKNFNKKVVEKMGLVYLVQYSPDQFKSSNIAKKELRKELMDLGFKVRYISENYKMMAIEGTATLQGVHPCQVWAYNMIKAPEAWAITGGSLSVKVAVLDTGIDHNHPSLANFVNTNLGRSFVGGNTMDVQGHGTHVAGTIASYGSVSGVMQSATLIPVKVLDNSGSGSLYGITQGILYAADIDADVINMSLGGGGYNQGMDEATQTAVAQGTIVVAATGNDGASSISYPAAYSSVIAVGSVDANRVRSSFSNYGSGLELMAPGSNIYSTYPNGRYRTLSGTSMATPHVAGVAGLIRAANPDIVVAQARQILRDTAQEAGSFTQYGYGIVDAHAAVVAASGGSGG

SEQ ID NO: 1461 - DNA, 1239 bp, synthetic construct
  misc_feature 1..1239: note = Variant of serine peptidase from Bacillus sinesaloumensis
  source 1..1239: mol_type = other DNA
atggcagatcaagctagtcaagctaatggaaaccaggacgtcattgaaggcgagctgatcgtttcagtggaaccgaagaacggtaaacctgatgtgagcattcaaagtgcacaatccgtaacagggcaggaagacgtccttaaatcgaaaggctttacgatcgttgataccttgcatgtagaggatagcagcgtcaagccactcgtctcgaagaatttcaataagaaagtggtggagaagatgggactggtgtatcttgttcaatactctccggaccagtttaaaagttccaacattgcgaagaaagaactcagaaaagaattgatggatctgggctttaaagtccgctatataagcgaaaattacaagatgatggcgatcgaaggtacagccactcttcagggggtgcacccttgtcaagtttgggcgtataatatgattaaagctccggaagcgtgggctattacgggcggatccctgagcgttaaagtagcagtcctggatacagggatcgaccataatcacccatccttggccaacttcgtgaatactaatcttggccgctcgtttgttggaggaaacaccatggatgttcaaggtcatggcacacatgttgctggcacgattgcatcttatgggagtgtaagcggagtgatgcagagtgcgacactgatcccggtcaaagtgctcgataattctggcagcgggtccctttacggtattacgcagggcatattgtatgccgccgacatcgatgcagacgtcattaacatgtctctgggtggaggaggctataatcagggcatggatgaggctactcaaacagcagttgctcagggaaccattgtagtagcagcgactggcaatgatggtgcatcgtcgatcagttatcctgctgcctacagcagcgtcattgcggtgggatctgtggaccaaaatcgtgttcgatcctcgttttctaactatggatctgggcttgaactgatggcaccgggcagcaacatctacagtacgtatcctaatggcagatatcgcacgttgagtggtacaagcatggctactccgcacgttgcgggcgtagctgggctcattcgcgcagccaacccagacatagtggtcgcgcaagcccgtcagattctgcgggataccgcgcaagaagcaggaccgttcacacagtacggctatggaatcgtcgatgctcatgccgccgttgttgctgcatccggtggttcgggcggc

SEQ ID NO: 1462 - protein, 413 aa, synthetic construct
  REGION 1..413: note = Variant of serine peptidase from Bacillus sinesaloumensis
MADQASQANGNQDVIEGELIVSVEPKNGKPDVSIQSAQSVTGQEDVLKSKGFTIVDTLHVEDSSVKPLVSKNFNKKVVEKMGLVYLVQYSPDQFKSSNIAKKELRKELMDLGFKVRYISENYKMMAIEGTATLQGVHPCQVWAYNMIKAPEAWAITGGSLSVKVAVLDTGIDHNHPSLANFVNTNLGRSFVGGNTMDVQGHGTHVAGTIASYGSVSGVMQSATLIPVKVLDNSGSGSLYGITQGILYAADIDADVINMSLGGGGYNQGMDEATQTAVAQGTIVVAATGNDGASSISYPAAYSSVIAVGSVDQNRVRSSFSNYGSGLELMAPGSNIYSTYPNGRYRTLSGTSMATPHVAGVAGLIRAANPDIVVAQARQILRDTAQEAGPFTQYGYGIVDAHAAVVAASGGSGG

SEQ ID NO: 1463 - DNA, 1239 bp, synthetic construct
  misc_feature 1..1239: note = Variant of serine peptidase from Bacillus sinesaloumensis
  source 1..1239: mol_type = other DNA
atggcagatcaagctagtcaagctaatggaaaccaggacgtcattgaaggcgagctgatcgtttcagtggaaccgaagaacggtaaacctgatgtgagcattcaaagtgcacaatccgtaacagggcaggaagacgtccttaaatcgaaaggctttacgatcgttgataccttgcatgtagaggatagcagcgtcaagccactcgtctcgaagaatttcaataagaaagtggtggagaagatgggactggtgtatcttgttcaatactctccggaccagtttaaaagttccaacattgcgaagaaagaactcagaaaagaattgatggatctgggctttaaagtccgctatataagcgaaaattacaagatgatggcgatcgaaggtacagccactcttcagggggtgcacccttgtcaagtttgggcgtataatatgattaaagctccggaagcgtgggctattacgggcggatccctgagcgttaaagtagcagtcctggatacagggatcgaccataatcacccatccttggccaacttcgtgaatactaatcttggccgctcgtttgttggaggaaacaccatggatgttcaaggtcatggcacacatgttgctggcacgattgcatcttatgggagtgtaagcggagtgatgcagagtgcgacactgatcccggtcaaagtgctcgataattctggcagcgggtccctttacggtattacgcagggcatattgtatgccgccgacatcgatgcagacgtcattaacatgtctctgggtggaggaggctataatcagggcatggatgaggctactcaaacagcagttgctcagggaaccattgtagtagcagcgactggcaatgatggtgcatcgtcgatcagttatcctgctgcctacagcagcgtcattgcggtgggatctgtggaccaaaatcgtgttcgatcccctttttctaactatggatctgggcttgaactgatggcaccgggcagcaacatctacagtacgtatcctaatggcagatatcgcacgttgagtggtacaagcatggctactccgcacgttgcgggcgtagctgggctcattcgcgcagccaacccagacatagtggtcgcgcaagcccgtcagattctgcgggataccgcgcaagaagcaggatcgttcacacagtacggctatggaatcgtcgatgctcatgccgccgttgttgctgcatccggtggttcgggcggc

SEQ ID NO: 1464 - protein, 413 aa, synthetic construct
  REGION 1..413: note = Variant of serine peptidase from Bacillus sinesaloumensis
MADQASQANGNQDVIEGELIVSVEPKNGKPDVSIQSAQSVTGQEDVLKSKGFTIVDTLHVEDSSVKPLVSKNFNKKVVEKMGLVYLVQYSPDQFKSSNIAKKELRKELMDLGFKVRYISENYKMMAIEGTATLQGVHPCQVWAYNMIKAPEAWAITGGSLSVKVAVLDTGIDHNHPSLANFVNTNLGRSFVGGNTMDVQGHGTHVAGTIASYGSVSGVMQSATLIPVKVLDNSGSGSLYGITQGILYAADIDADVINMSLGGGGYNQGMDEATQTAVAQGTIVVAATGNDGASSISYPAAYSSVIAVGSVDQNRVRSPFSNYGSGLELMAPGSNIYSTYPNGRYRTLSGTSMATPHVAGVAGLIRAANPDIVVAQARQILRDTAQEAGSFTQYGYGIVDAHAAVVAASGGSGG

SEQ ID NO: 1465 - DNA, 1239 bp, synthetic construct
  misc_feature 1..1239: note = Variant of serine peptidase from Bacillus sinesaloumensis
  source 1..1239: mol_type = other DNA
atggcagatcaagctagtcaagctaatggaaaccaggacgtcattgaaggcgagctgatcgtttcagtggaaccgaagaacggtaaacctgatgtgagcattcaaagtgcacaatccgtaacagggcaggaagacgtccttaaatcgaaaggctttacgatcgttgataccttgcatgtagaggatagcagcgtcaagccactcgtctcgaagaatttcaataagaaagtggtggagaagatgggactggtgtatcttgttcaatactctccggaccagtttaaaagttccaacattgcgaagaaagaactcagaaaagaattgatggatctgggctttaaagtccgctatataagcgaaaattacaagatgatggcgatcgaaggtacagccactcttcagggggtgcacccttgtcaagtttgggcgtataatatgattaaagctccggaagcgtgggctattacgggcggatccctgagcgttaaagtagcagtcctggatacagggatcgaccataatcacccatccttggccaacttcgtgaatactaatcttggccgctcgtttgttggaggaaacaccatggatgttcaaggtcatggcacacatgttgctggcacgattgcatcttatgggagtgtaagcggagtgatgcagagtgcgacactgatcccggtcaaagtgctcgataattctggcagcgggtccctttacggtattacgcagggcatattgtatgccgccgacatcgatgcagacgtcattaacatgtctctgggtggaggaggctataatcagggcatggatgaggctactcaaacagcagttgctcagggaaccattgtagtagcagcgactggcaatgatggtgcatcgtcgatcagttatcctgctgcctacagcagcgtcattgcggtgggatctgtggaccaaaatcgtgttcgatcctcgttttctaactatggatctgggcttgaactgatggcaccgggcagcaacatctacagtacgtatcctaatggcagatatcgcacgttgagtggtacaagcatggctactccgcacgttgcgggcgtagctgggctcattcgcgcagccaacccagacatagtggtcgcgcaagcccgtcagattctgcgggataccgcgcaagaagcaggatcgttctcgcagtacggctatggaatcgtcgatgctcatgccgccgttgttgctgcatccggtggttcgggcggc

SEQ ID NO: 1466 - protein, 413 aa, synthetic construct
  REGION 1..413: note = Variant of serine peptidase from Bacillus sinesaloumensis
MADQASQANGNQDVIEGELIVSVEPKNGKPDVSIQSAQSVTGQEDVLKSKGFTIVDTLHVEDSSVKPLVSKNFNKKVVEKMGLVYLVQYSPDQFKSSNIAKKELRKELMDLGFKVRYISENYKMMAIEGTATLQGVHPCQVWAYNMIKAPEAWAITGGSLSVKVAVLDTGIDHNHPSLANFVNTNLGRSFVGGNTMDVQGHGTHVAGTIASYGSVSGVMQSATLIPVKVLDNSGSGSLYGITQGILYAADIDADVINMSLGGGGYNQGMDEATQTAVAQGTIVVAATGNDGASSISYPAAYSSVIAVGSVDQNRVRSSFSNYGSGLELMAPGSNIYSTYPNGRYRTLSGTSMATPHVAGVAGLIRAANPDIVVAQARQILRDTAQEAGSFSQYGYGIVDAHAAVVAASGGSGG

SEQ ID NO: 1467 - DNA, 1239 bp, synthetic construct
  misc_feature 1..1239: note = Variant of serine peptidase from Bacillus sinesaloumensis
  source 1..1239: mol_type = other DNA
atggcagatcaagctagtcaagctaatggaaaccaggacgtcattgaaggcgagctgatcgtttcagtggaaccgaagaacggtaaacctgatgtgagcattcaaagtgcacaatccgtaacagggcaggaagacgtccttaaatcgaaaggctttacgatcgttgataccttgcatgtagaggatagcagcgtcaagccactcgtctcgaagaatttcaataagaaagtggtggagaagatgggactggtgtatcttgttcaatactctccggaccagtttaaaagttccaacattgcgaagaaagaactcagaaaagaattgatggatctgggctttaaagtccgctatataagcgaaaattacaagatgatggcgatcgaaggtacagccactcttcagggggtgcacccttgtcaagtttgggcgtataatatgattaaagctccggaagcgtgggctattacgggcggatccctgagcgttaaagtagcagtcctggatacagggatcgaccataatcacccatccttggccaacttcgtgaatactaatcttggccgctcgtttgttggaggaaacaccatggatgttcaaggtcatggcacacatgttgctggcacgattgcatcttatgggagtgtaagcggagtgatgcagagtgcgacactgatcccggtcaaagtgctcgataattctggcagcgggtccctttacggtattacgcagggcatattgtatgccgccgacatcgatgcagacgtcattaacatgtctctgggtggaggaggctataatcagggcatggatgaggctactcaaacagcagttgctcagggaaccattgtagtagcagcgactggcaatgatggtgcatcgtcgatcagttatcctgctgcctacagcagcgtcattgcggtgggatctgtggaccaaaatcgtgttcgatcctcgttttctaactatggatctgggcttgaactgatggcaccgggcagcaacatctacagtacgtatcctaatggcagatatcgcacgttgagtggtacaagcatggctactccgcacgttgcgggcgtagctgggctcattcgcgcagccaacccagacatagtggtcgcgcaagcccgtcagattctgcgggataccgcgcaagaagcaggatcgttcacacagtacggctatggaatcgtcgatgctcatgccgccgttgttgctgcatccggtggttcgacgggc

SEQ ID NO: 1468 - protein, 413 aa, synthetic construct
  REGION 1..413: note = Variant of serine peptidase from Bacillus sinesaloumensis
MADQASQANGNQDVIEGELIVSVEPKNGKPDVSIQSAQSVTGQEDVLKSKGFTIVDTLHVEDSSVKPLVSKNFNKKVVEKMGLVYLVQYSPDQFKSSNIAKKELRKELMDLGFKVRYISENYKMMAIEGTATLQGVHPCQVWAYNMIKAPEAWAITGGSLSVKVAVLDTGIDHNHPSLANFVNTNLGRSFVGGNTMDVQGHGTHVAGTIASYGSVSGVMQSATLIPVKVLDNSGSGSLYGITQGILYAADIDADVINMSLGGGGYNQGMDEATQTAVAQGTIVVAATGNDGASSISYPAAYSSVIAVGSVDQNRVRSSFSNYGSGLELMAPGSNIYSTYPNGRYRTLSGTSMATPHVAGVAGLIRAANPDIVVAQARQILRDTAQEAGSFTQYGYGIVDAHAAVVAASGGSTG

SEQ ID NO: 1469 - DNA, 1239 bp, synthetic construct
  misc_feature 1..1239: note = Variant of serine peptidase from Bacillus sinesaloumensis
  source 1..1239: mol_type = other DNA
atggcagatcaagctagtcaagctaatggaaaccaggacgtcattgaaggcgagctgatcgtttcagtggaaccgaagaacggtaaacctgatgtgagcattcaaagtgcacaatccgtaacagggcaggaagacgtccttaaatcgaaaggctttacgatcgttgataccttgcatgtagaggatagcagcgtcaagccactcgtctcgaagaatttcaataagaaagtggtggagaagatgggactggtgtatcttgttcaatactctccggaccagtttaaaagttccaacattgcgaagaaagaactcagaaaagaattgatggatctgggctttaaagtccgctatataagcgaaaattacaagatgatggcgatcgaaggtacagccactcttcagggggtgcacccttgtcaagtttgggcgtataatatgattaaagctccggaagcgtgggctattacgggcggatccctgagcgttaaagtagcagtcctggatacagggatcgaccataatcacccatccttggccaacttcgtgaatactaatcttggccgctcgtttgttggaggaaacaccatggatgttcaaggtcatggcacacatgttgctggcacgattgcatcttatgggagtgtaagcggagtgatgcagagtgcgacactgatcccggtcaaagtgctcgataattctggcagcgggtccctttacggtattacgcagggcatattgtatgccgccgacatcgatgcagacgtcattaacatgtctctgggtggaggaggctataatcagggcatggatgaggctactcaaacagcagttgctcagggaaccattgtagtagcagcgactggcaatgatggtgcatcgtcgatcagttatcctgctgcctacagcagcgtcattgcggtgggatctgtggaccaaaatcgtgttcgatcctcgttttctaactatggatctgggcttgaactgatggcaccgggcagcaacatctacagtacgtatcctaatggcagatatcgcacgttgagtggtacaagcatggctactccgcacgtttctggcgtagctgggctcattcgcgcagccaacccagacatagtggtcgcgcaagcccgtcagattctgcgggataccgcgcaagaagcaggatcgttcacacagtacggctatggaatcgtcgatgctcatgccgccgttgttgctgcatccggtggttcgggcggc

SEQ ID NO: 1470 - protein, 413 aa, synthetic construct
  REGION 1..413: note = Variant of serine peptidase from Bacillus sinesaloumensis
MADQASQANGNQDVIEGELIVSVEPKNGKPDVSIQSAQSVTGQEDVLKSKGFTIVDTLHVEDSSVKPLVSKNFNKKVVEKMGLVYLVQYSPDQFKSSNIAKKELRKELMDLGFKVRYISENYKMMAIEGTATLQGVHPCQVWAYNMIKAPEAWAITGGSLSVKVAVLDTGIDHNHPSLANFVNTNLGRSFVGGNTMDVQGHGTHVAGTIASYGSVSGVMQSATLIPVKVLDNSGSGSLYGITQGILYAADIDADVINMSLGGGGYNQGMDEATQTAVAQGTIVVAATGNDGASSISYPAAYSSVIAVGSVDQNRVRSSFSNYGSGLELMAPGSNIYSTYPNGRYRTLSGTSMATPHVSGVAGLIRAANPDIVVAQARQILRDTAQEAGSFTQYGYGIVDAHAAVVAASGGSGG

SEQ ID NO: 1471 - DNA, 1239 bp, synthetic construct
  misc_feature 1..1239: note = Variant of serine peptidase from Bacillus sinesaloumensis
  source 1..1239: mol_type = other DNA
atggcagatcaagctagtcaagctaatggaaaccaggacgtcattgaaggcgagctgatcgtttcagtggaaccgaagaacggtaaacctgatgtgagcattcaaagtgcacaatccgtaacagggcaggaagacgtccttaaatcgaaaggctttacgatcgttgataccttgcatgtagaggatagcagcgtcaagccactcgtctcgaagaatttcaataagaaagtggtggagaagatgggactggtgtatcttgttcaatactctccggaccagtttaaaagttccaacattgcgaagaaagaactcagaaaagaattgatggatctgggctttaaagtccgctatataagcgaaaattacaagatgatggcgatcgaaggtacagccactcttcagggggtgcacccttgtcaagtttgggcgtataatatgattaaagctccggaagcgtgggctattacgggcggatccctgagcgttaaagtagcagtcctggatacagggatcgaccataatcacccatccttggccaacttcgtgaatactaatcttggccgctcgtttgttggaggaaacaccatggatgttcaaggtcatggcacacatgttgctggcacgattgcatcttatgggagtgtaagcggagtgatgcagagtgcgacactgatcccggtcaaagtgctcgataattctggcagcgggtccctttacggtattacgcagggcatattgtatgccgccgacatcgatgcagacgtcattaacatgtctctgggtggaggaggctataatcagggcatggatgaggctactcaaacagcagttgctcagggaaccattgtagtagcagcgactggcaatgatggtgcatcgtcgatcagttatcctgctgcctacagcagcgtcattgcggtgggatctgtggaccaaaatcgtgttcgatcctcgttttctaactatggatctgggcttgaactgatggcaccgggcagcaacatctacagtacgtatcctaatggcagatatcgcacgttgagtggtacaagcatggctactccgcacgttgcgggcgtagctgggctcattcgcgcagccaacccagacatagtggtcgcgcaagcccgtcagattctgcgggataccgcgcaagaagcaggatgtttcacacagtacggctatggaatcgtcgatgctcatgccgccgttgttgctgcatccggtggttcgggcggc

SEQ ID NO: 1472 - protein, 413 aa, synthetic construct
  REGION 1..413: note = Variant of serine peptidase from Bacillus sinesaloumensis
MADQASQANGNQDVIEGELIVSVEPKNGKPDVSIQSAQSVTGQEDVLKSKGFTIVDTLHVEDSSVKPLVSKNFNKKVVEKMGLVYLVQYSPDQFKSSNIAKKELRKELMDLGFKVRYISENYKMMAIEGTATLQGVHPCQVWAYNMIKAPEAWAITGGSLSVKVAVLDTGIDHNHPSLANFVNTNLGRSFVGGNTMDVQGHGTHVAGTIASYGSVSGVMQSATLIPVKVLDNSGSGSLYGITQGILYAADIDADVINMSLGGGGYNQGMDEATQTAVAQGTIVVAATGNDGASSISYPAAYSSVIAVGSVDQNRVRSSFSNYGSGLELMAPGSNIYSTYPNGRYRTLSGTSMATPHVAGVAGLIRAANPDIVVAQARQILRDTAQEAGCFTQYGYGIVDAHAAVVAASGGSGG

SEQ ID NO: 1473 - DNA, 1239 bp, synthetic construct
  misc_feature 1..1239: note = Variant of serine peptidase from Bacillus sinesaloumensis
  source 1..1239: mol_type = other DNA
atggcagatcaagctagtcaagctaatggaaaccaggacgtcattgaaggcgagctgatcgtttcagtggaaccgaagaacggtaaacctgatgtgagcattcaaagtgcacaatccgtaacagggcaggaagacgtccttaaatcgaaaggctttacgatcgttgataccttgcatgtagaggatagcagcgtcaagccactcgtctcgaagaatttcaataagaaagtggtggagaagatgggactggtgtatcttgttcaatactctccggaccagtttaaaagttccaacattgcgaagaaagaactcagaaaagaattgatggatctgggctttaaagtccgctatataagcgaaaattacaagatgatggcgatcgaaggtacagccactcttcagggggtgcacccttgtcaagtttgggcgtataatatgattaaagctccggaagcgtgggctattacgggcggatccctgagcgttaaagtagcagtcctggatacagggatcgaccataatcacccatccttggccaacttcgtgaatactaatcttggccgctcgtttgttggaggaaacaccatggatgttcaaggtcatggcacacatgttgctggcacgattgcatcttatgggagtgtaagcggagtgatgcagagtgcgacactgatcccggtcaaagtgctcgataattctggcgtggggtccctttacggtattacgcagggcatattgtatgccgccgacatcgatgcagacgtcattaacatgtctctgggtggaggaggctataatcagggcatggatgaggctactcaaacagcagttgctcagggaaccattgtagtagcagcgactggcaatgatggtgcatcgtcgatcagttatcctgctgcctacagcagcgtcattgcggtgggatctgtggaccaaaatcgtgttcgatcctcgttttctaactatggatctgggcttgaactgatggcaccgggcagcaacatctacagtacgtatcctaatggcagatatcgcacgttgagtggtacaagcatggctactccgcacgttgcgggcgtagctgggctcattcgcgcagccaacccagacatagtggtcgcgcaagcccgtcagattctgcgggataccgcgcaagaagcaggatcgttcacacagtacggctatggaatcgtcgatgctcatgccgccgttgttgctgcatccggtggttcgggcggc

SEQ ID NO: 1474 - protein, 413 aa, synthetic construct
  REGION 1..413: note = Variant of serine peptidase from Bacillus sinesaloumensis
MADQASQANGNQDVIEGELIVSVEPKNGKPDVSIQSAQSVTGQEDVLKSKGFTIVDTLHVEDSSVKPLVSKNFNKKVVEKMGLVYLVQYSPDQFKSSNIAKKELRKELMDLGFKVRYISENYKMMAIEGTATLQGVHPCQVWAYNMIKAPEAWAITGGSLSVKVAVLDTGIDHNHPSLANFVNTNLGRSFVGGNTMDVQGHGTHVAGTIASYGSVSGVMQSATLIPVKVLDNSGVGSLYGITQGILYAADIDADVINMSLGGGGYNQGMDEATQTAVAQGTIVVAATGNDGASSISYPAAYSSVIAVGSVDQNRVRSSFSNYGSGLELMAPGSNIYSTYPNGRYRTLSGTSMATPHVAGVAGLIRAANPDIVVAQARQILRDTAQEAGSFTQYGYGIVDAHAAVVAASGGSGG

SEQ ID NO: 1475 - DNA, 1239 bp, synthetic construct
  misc_feature 1..1239: note = Variant of serine peptidase from Bacillus sinesaloumensis
  source 1..1239: mol_type = other DNA
atggcagatcaagctagtcaagctaatggaaaccaggacgtcattgaaggcgagctgatcgtttcagtggaaccgaagaacggtaaacctgatgtgagcattcaaagtgcacaatccgtaacagggcaggaagacgtccttaaatcgaaaggctttacgatcgttgataccttgcatgtagaggatagcagcgtcaagccactcgtctcgaagaatttcaataagaaagtggtggagaagatgggactggtgtatcttgttcaatactctccggaccagtttaaaagttccaacattgcgaagaaagaactcagaaaagaattgatggatctgggctttaaagtccgctatataagcgaaaattacaagatgatggcgatcgaaggtacagccactcttcagggggtgcacccttgtcaagtttgggcgtataatatgattaaagctccggaagcgtgggctattacgggcggatccctgagcgttaaagtagcagtcctggatacagggatcgaccataatcacccatccttggccaacttcgtgaatactaatcttggccgctcgtttgttggaggaaacaccatggatgttcaaggtcatggcacacatgttgctggcacgattgcatcttatgggagtgtaagcggagtgatgcagagtgcgacactgatcccggtcaaagtgctcgataattctggcagcgggtccctttacggtattacgcagggcatattgtatgccgccgacatcgatgcagacgtcattaacatgtctctgggtggaggaggctataatcagggcatggatgaggctactcaaacagcagttgctcagggaaccattgtagtagcagcgactggcaatgatggtgcatcgtcgatcagttatcctgctgcctacagcagcgtcattgcggtgggatctgtggaccaaaatcgtgttcgatcctcgttttctaactatggatctgggcttgaactgatggcaccgggcagcaacatctacagtacgtatcctaatggcagatatcgcacgttgagtggtacaagcatggctactccgcacgttgcgggcgtagctgggctcattcgcgcagccaacccagacatagtggtcgcgcaagcccgtcagattctgcgggataccgcgcaagaagcaggatcgttcctgcagtacggctatggaatcgtcgatgctcatgccgccgttgttgctgcatccggtggttcgggcggc

SEQ ID NO: 1476 - protein, 413 aa, synthetic construct
  REGION 1..413: note = Variant of serine peptidase from Bacillus sinesaloumensis
MADQASQANGNQDVIEGELIVSVEPKNGKPDVSIQSAQSVTGQEDVLKSKGFTIVDTLHVEDSSVKPLVSKNFNKKVVEKMGLVYLVQYSPDQFKSSNIAKKELRKELMDLGFKVRYISENYKMMAIEGTATLQGVHPCQVWAYNMIKAPEAWAITGGSLSVKVAVLDTGIDHNHPSLANFVNTNLGRSFVGGNTMDVQGHGTHVAGTIASYGSVSGVMQSATLIPVKVLDNSGSGSLYGITQGILYAADIDADVINMSLGGGGYNQGMDEATQTAVAQGTIVVAATGNDGASSISYPAAYSSVIAVGSVDQNRVRSSFSNYGSGLELMAPGSNIYSTYPNGRYRTLSGTSMATPHVAGVAGLIRAANPDIVVAQARQILRDTAQEAGSFLQYGYGIVDAHAAVVAASGGSGG

SEQ ID NO: 1477 - DNA, 1239 bp, synthetic construct
  misc_feature 1..1239: note = Variant of serine peptidase from Bacillus sinesaloumensis
  source 1..1239: mol_type = other DNA
atggcagatcaagctagtcaagctaatggaaaccaggacgtcattgaaggcgagctgatcgtttcagtggaaccgaagaacggtaaacctgatgtgagcattcaaagtgcacaatccgtaacagggcaggaagacgtccttaaatcgaaaggctttacgatcgttgataccttgcatgtagaggatagcagcgtcaagccactcgtctcgaagaatttcaataagaaagtggtggagaagatgggactggtgtatcttgttcaatactctccggaccagtttaaaagttccaacattgcgaagaaagaactcagaaaagaattgatggatctgggctttaaagtccgctatataagcgaaaattacaagatgatggcgatcgaaggtacagccactcttcagggcgtgcaccctaatcaagtgtgggcctataatatgattaaagctccggaagcgtgggctattacgggtggatccctgagcgttaaagtagcagtcctggatacagggatcgaccataatcacccatccttggccaacttcgtgaatactaatcttggccgctcgtttgttggaggaaacaccatggatgttcaaggtcatggcacacatgttgctggcacgattgcatcttatgggagtgtaagcggagtgatgcagagtgcgacactgatcccggtcaaagtgctcgataattctggcagcgggtccctttacggtattacgcagggcatattgtatgccgccgacatcgatgcagacgtcattaacatgtctctgggtggaggaggctataatcagggcatggatgaggctgttcaaacagcagttgctcagggaaccattgtagtagcagcgactggcaatgatggtgcatcgtcgatcagttatcctgctgcctacagcagcgtcattgcggtgggatctgtgacgcagaatcgtgtacgatcctcgttttctaactatggatctgggcttgaagtgatggcaccgggcagcaacatctacagtacgtatcctaatggcagatatcgcacgttgagtggtacaagcatggctactccgcacgttgcgggcgtagctgggctcattcgcgcagccaacccagacataagcgtcgcgcaagcccgtcagattctgcgggataccgcgcaagaagcaggatcgttcacacagtacggctatggaatcgtcgatgctcatgccgccgttgttgctgcatccggtggttcgggcggc

SEQ ID NO: 1478 - protein, 413 aa, synthetic construct
  REGION 1..413: note = Variant of serine peptidase from Bacillus sinesaloumensis
MADQASQANGNQDVIEGELIVSVEPKNGKPDVSIQSAQSVTGQEDVLKSKGFTIVDTLHVEDSSVKPLVSKNFNKKVVEKMGLVYLVQYSPDQFKSSNIAKKELRKELMDLGFKVRYISENYKMMAIEGTATLQGVHPNQVWAYNMIKAPEAWAITGGSLSVKVAVLDTGIDHNHPSLANFVNTNLGRSFVGGNTMDVQGHGTHVAGTIASYGSVSGVMQSATLIPVKVLDNSGSGSLYGITQGILYAADIDADVINMSLGGGGYNQGMDEAVQTAVAQGTIVVAATGNDGASSISYPAAYSSVIAVGSVTQNRVRSSFSNYGSGLEVMAPGSNIYSTYPNGRYRTLSGTSMATPHVAGVAGLIRAANPDISVAQARQILRDTAQEAGSFTQYGYGIVDAHAAVVAASGGSGG

SEQ ID NO: 1479 - DNA, 1239 bp, synthetic construct
  misc_feature 1..1239: note = Variant of serine peptidase from Bacillus sinesaloumensis
  source 1..1239: mol_type = other DNA
atggcagatcaagctagtcaagctaatggaaaccaggacgtcattgaaggcgagctgatcgtttcagtggaaccgaagaacggtaaacctgatgtgagcattcaaagtgcacaatccgtaacagggcaggaagacgtccttaaatcgaaaggctttacgatcgttgataccttgcatgtagaggatagcagcgtcaagccactcgtctcgaagaatttcaataagaaagtggtggagaagatgggactggtgtatcttgttcaatactctccggaccagtttaaaagttccaacattgcgaagaaagaactcagaaaagaattgatggatctgggctttaaagtccgctatataagcgaaaattacaagatgatggcgatcgaaggtacagccactcttcagggggtgcacccttgtcaagtttgggcgtataatatgattaaagctccggaagcgtgggctattacgggtggatccctgagcgttaaagtagcagtcctggatacagggatcgaccataatcacccatccttggccaacttcgtgaatactaatcttggccgctcgtttgttggaggaaacaccatggatgttcaaggtcatggcacacatgttgctggcacgattgcatcttatgggagtgtaagcggagtgatgcagagtgcgacactgatcccggtcaaagtgctcgataattctggcagcgggtccctttacggtattacgcagggcatattgtatgccgccgacatcgatgcagacgtcattaacatgtctctgggtggaggaggctataatcagggcatggatgaggctactcaaacagcagttgctcagggaaccattgtagtagcagcgactggcaatgatggtgcatcgtcgatcagttatcctgctgcctacagcagcgtcattgcggtgggatctgtgacgcagaatcgtgtacgatcctcgttttctaactatggatctgggcttgaactgatggcaccgggcagcaacatctacagtacgtatcctaatggcagatatcgcacgttgagtggtacaagcatggctactccgcacgttgcgggcgtagctgggctcattcgcgcagccaacccagacatagtggtcgcgcaagcccgtcagattctgcgggataccgcgcaagaagcaggatcgttcacacagtacggctatggaatcgtcgatgctcatgccgccgttgttgctgcatccggtggttcgggcggc

SEQ ID NO: 1480 - protein, 413 aa, synthetic construct
  REGION 1..413: note = Variant of serine peptidase from Bacillus sinesaloumensis
MADQASQANGNQDVIEGELIVSVEPKNGKPDVSIQSAQSVTGQEDVLKSKGFTIVDTLHVEDSSVKPLVSKNFNKKVVEKMGLVYLVQYSPDQFKSSNIAKKELRKELMDLGFKVRYISENYKMMAIEGTATLQGVHPCQVWAYNMIKAPEAWAITGGSLSVKVAVLDTGIDHNHPSLANFVNTNLGRSFVGGNTMDVQGHGTHVAGTIASYGSVSGVMQSATLIPVKVLDNSGSGSLYGITQGILYAADIDADVINMSLGGGGYNQGMDEATQTAVAQGTIVVAATGNDGASSISYPAAYSSVIAVGSVTQNRVRSSFSNYGSGLELMAPGSNIYSTYPNGRYRTLSGTSMATPHVAGVAGLIRAANPDIVVAQARQILRDTAQEAGSFTQYGYGIVDAHAAVVAASGGSGG

SEQ ID NO: 1481 - DNA, 1239 bp, synthetic construct
  misc_feature 1..1239: note = Variant of serine peptidase from Bacillus sinesaloumensis
  source 1..1239: mol_type = other DNA
atggcagatcaagctagtcaagctaatggaaaccaggacgtcattgaaggcgagctgatcgtttcagtggaaccgaagaacggtaaacctgatgtgagcattcaaagtgcacaatccgtaacagggcaggaagacgtccttaaatcgaaaggctttacgatcgttgataccttgcatgtagaggatagcagcgtcaagccactcgtctcgaagaatttcaataagaaagtggtggagaagatgggactggtgtatcttgttcaatactctccggaccagtttaaaagttccaacattgcgaagaaagaactcagaaaagaattgatggatctgggctttaaagtccgctatataagcgaaaattacaagatgatggcgatcgaaggtacagccactcttcagggggtgcacccttgtcaagtttgggcgtataatatgattaaagctccggaagcgtgggctattacgggcggatccctgagcgttaaagtagcagtcctggatacagggatcgaccataatcacccatccttggccaacttcgtgaatactaatcttggccgctcgtttgttggaggaaacaccatggatgttcaaggtcatggcacacatgttgctggcacgattgcatcttatgggagtgtaagcggagtgatgcagagtgcgacactgatcccggtcaaagtgctcgataattctggcagcgggtccctttacggtattacgcagggcatattgtatgccgccgacatcgatgcagacgtcattaacatgtctctgggtggaggaggctataatcagggcatggatgaggctacgcaaacagcagttgctcagggaaccattgtagtagcagcgactggcaatgatggtgcatcgtcgatcagttatcctgctgcctacagcagcgtcattgcggtgggatctgtggacagtaatcgtgtacgatcctcgttttctaactatggatctgggcttgaactgatggcaccgggcagcaacatctacagtacgtatcctaatggcagatatcgcacgttgagtggtacaagcatggctactccgcacgttgcgggcgtagctgggctcattcgcgcagccaacccagacatagtggtcgcgcaagcccgtcagattctgcgggataccgcgcaagaagcaggatcgttcacacagtacggctatggaatcgtcgatgctcatgccgccgttgttgctgcatccggtggttcgggcggc

SEQ ID NO: 1482 - protein, 413 aa, synthetic construct
  REGION 1..413: note = Variant of serine peptidase from Bacillus sinesaloumensis
MADQASQANGNQDVIEGELIVSVEPKNGKPDVSIQSAQSVTGQEDVLKSKGFTIVDTLHVEDSSVKPLVSKNFNKKVVEKMGLVYLVQYSPDQFKSSNIAKKELRKELMDLGFKVRYISENYKMMAIEGTATLQGVHPCQVWAYNMIKAPEAWAITGGSLSVKVAVLDTGIDHNHPSLANFVNTNLGRSFVGGNTMDVQGHGTHVAGTIASYGSVSGVMQSATLIPVKVLDNSGSGSLYGITQGILYAADIDADVINMSLGGGGYNQGMDEATQTAVAQGTIVVAATGNDGASSISYPAAYSSVIAVGSVDSNRVRSSFSNYGSGLELMAPGSNIYSTYPNGRYRTLSGTSMATPHVAGVAGLIRAANPDIVVAQARQILRDTAQEAGSFTQYGYGIVDAHAAVVAASGGSGG

SEQ ID NO: 1483 - DNA, 1239 bp, synthetic construct
  misc_feature 1..1239: note = Variant of serine peptidase from Bacillus sinesaloumensis
  source 1..1239: mol_type = other DNA
atggcagatcaagctagtcaagctaatggaaaccaggacgtcattgaaggcgagctgatcgtttcagtggaaccgaagaacggtaaacctgatgtgagcattcaaagtgcacaatccgtaacagggcaggaagacgtccttaaatcgaaaggctttacgatcgttgataccttgcatgtagaggatagcagcgtcaagccactcgtctcgaagaatttcaataagaaagtggtggagaagatgggactggtgtatcttgttcaatactctccggaccagtttaaaagttccaacattgcgaagaaagaactcagaaaagaattgatggatctgggctttaaagtccgctatataagcgaaaattacaagatgatggcgatcgaaggtacagccactcttcagggggtgcacccttgtcaagtttgggcgtataatatgattaaagctccggaagcgtgggctattacgggcggatccctgagcgttaaagtagcagtcctggatacagggatcgaccataatcacccatccttggccaacttcgtgaatactaatcttggccgctcgtttgttggaggaaacaccatggatgttcaaggtcatggcacacatgttgctggcacgattgcatcttatgggagtgtaagcggagtgatgcagagtgcgacactgatcccggtcaaagtgctcgataattctggcagcgggtccctttacggtattacgcagggcatattgtatgccgccgacatcgatgcagacgtcattaacatgtctctgggtggaggaggctataatcagggcatggatgaggctactcaaacagcagttgctcagggaaccattgtagtagcagcgactggcaatgatggtgcatcgtcgatcagttatcctgctgcctacagcagcgtcattgcggtgggatctgtggaccagaatcgtgtacgatcctcgttttctaactatggatctgggcttgaactgatggcaccgggcagcaacatctacagtacgtatcctaatggcagatatcgcacgttgagtggtacaagcatggctactccgcacgttgcgggcgtagctgggctcattcgcgcagccaacccagacataagcgtcgcgcaagcccgtcagattctgcgggataccgcgcaagaagcaggatcgttcacacagtacggctatggaatcgtcgatgctcatgccgccgttgttgctgcatccggtggttcgggcggc

SEQ ID NO: 1484 - protein, 413 aa, synthetic construct
  REGION 1..413: note = Variant of serine peptidase from Bacillus sinesaloumensis
MADQASQANGNQDVIEGELIVSVEPKNGKPDVSIQSAQSVTGQEDVLKSKGFTIVDTLHVEDSSVKPLVSKNFNKKVVEKMGLVYLVQYSPDQFKSSNIAKKELRKELMDLGFKVRYISENYKMMAIEGTATLQGVHPCQVWAYNMIKAPEAWAITGGSLSVKVAVLDTGIDHNHPSLANFVNTNLGRSFVGGNTMDVQGHGTHVAGTIASYGSVSGVMQSATLIPVKVLDNSGSGSLYGITQGILYAADIDADVINMSLGGGGYNQGMDEATQTAVAQGTIVVAATGNDGASSISYPAAYSSVIAVGSVDQNRVRSSFSNYGSGLELMAPGSNIYSTYPNGRYRTLSGTSMATPHVAGVAGLIRAANPDISVAQARQILRDTAQEAGSFTQYGYGIVDAHAAVVAASGGSGG

SEQ ID NO: 1485 - DNA, 1239 bp, synthetic construct
  misc_feature 1..1239: note = Variant of serine peptidase from Bacillus sinesaloumensis
  source 1..1239: mol_type = other DNA
atggcagatcaagctagtcaagctaatggaaaccaggacgtcattgaaggcgagctgatcgtttcagtggaaccgaagaacggtaaacctgatgtgagcattcaaagtgcacaatccgtaacagggcaggaagacgtccttaaatcgaaaggctttacgatcgttgataccttgcatgtagaggatagcagcgtcaagccactcgtctcgaagaatttcaataagaaagtggtggagaagatgggactggtgtatcttgttcaatactctccggaccagtttaaaagttccaacattgcgaagaaagaactcagaaaagaattgatggatctgggctttaaagtccgctatataagcgaaaattacaagatgatggcgatcgaaggtacagccactcttcagggcgtgcaccctaatcaagtgtggcactataatatgattaaagctccggaagcgtgggctattacgagtggatcctcgagcgttaaagtagcagtcctggatacagggatcgaccataatcacccatccttggccaacttcgtgaatactaatcttggccgctcgtttgttggaggaaacaccatggatgttcaaggtcatggcacacatgttgctggcacgattgcatcttatgggagtgtaagcggagtgatgcagagtgcgacactgatcccggtcaaagtgctcgataattctggcagcgggtccctttacggtattacgcagggcatattgtatgccgccgacatcgatgcagacgtcattaacatgtctctgggtggaggaggctataatcagagcatggatgaggctgttcaaacagcagttgctcagggaaccattgtagtagcagcgactggcaatgatggtgcatcgtcgatcagttatcctgctgcctacagcagcgtcattgcggtgggatctgtgacgcagaatcgtactcgatcctcgttttctaactatggatctgggcttgaactgatggcaccgggcagcaacatctacagtacgtatcctaatggcagatatcgcacgttgagtggtacaagcatggctactccgcacgttgcgggcgtagctgggctcattcgcgcagccaacccagacatagtggtcgcgcaagcccgtcagattctgcgggataccgcgcaagaagcaggatcgttcacacagtacggctatggaatcgtcgatgctcatgccgccgttgttgctgcatccggtggttcgggcggc

SEQ ID NO: 1486 - protein, 413 aa, synthetic construct
  REGION 1..413: note = Variant of serine peptidase from Bacillus sinesaloumensis
MADQASQANGNQDVIEGELIVSVEPKNGKPDVSIQSAQSVTGQEDVLKSKGFTIVDTLHVEDSSVKPLVSKNFNKKVVEKMGLVYLVQYSPDQFKSSNIAKKELRKELMDLGFKVRYISENYKMMAIEGTATLQGVHPNQVWHYNMIKAPEAWAITSGSSSVKVAVLDTGIDHNHPSLANFVNTNLGRSFVGGNTMDVQGHGTHVAGTIASYGSVSGVMQSATLIPVKVLDNSGSGSLYGITQGILYAADIDADVINMSLGGGGYNQSMDEAVQTAVAQGTIVVAATGNDGASSISYPAAYSSVIAVGSVTQNRTRSSFSNYGSGLELMAPGSNIYSTYPNGRYRTLSGTSMATPHVAGVAGLIRAANPDIVVAQARQILRDTAQEAGSFTQYGYGIVDAHAAVVAASGGSGG

SEQ ID NO: 1487 - DNA, 1239 bp, synthetic construct
  misc_feature 1..1239: note = Variant of serine peptidase from Bacillus sinesaloumensis
  source 1..1239: mol_type = other DNA
atggcagatcaagctagtcaagctaatggaaaccaggacgtcattgaaggcgagctgatcgtttcagtggaaccgaagaacggtaaacctgatgtgagcattcaaagtgcacaatccgtaacagggcaggaagacgtccttaaatcgaaaggctttacgatcgttgataccttgcatgtagaggatagcagcgtcaagccactcgtctcgaagaatttcaataagaaagtggtggagaagatgggactggtgtatcttgttcaatactctccggaccagtttaaaagttccaacattgcgaagaaagaactcagaaaagaattgatggatctgggctttaaagtccgctatataagcgaaaattacaagatgatggcgatcgaaggtacagccactcttcagggcgtgcacccttgccaagtgtggcactataatatgattaaagctccggaagcgtgggctattacgggcggatccctgagcgttaaagtagcagtcctggatacagggatcgaccataatcacccatccttggccaacttcgtgaatactaatcttggccgctcgtttgttggaggaaacaccatggatgttcaaggtcatggcacacatgttgctggcacgattgcatcttatgggagtgtaagcggagtgatgcagagtgcgacactgatcccggtcaaagtgctcgataattctggcagcgggtccctttacggtattacgcagggcatattgtatgccgccgacatcgatgcagacgtcattaacatgtctctgggtggaggaggctataatcagggcatggatgaggctactcaaacagcagttgctcagggaaccattgtagtagcagcgactggcaatgatggtgcatcgtcgatcagttatcctgctgcctacagcagcgtcattgcggtgggatctgtggaccagaatcgtgtacgatcctcgttttctaactatggatctgggcttgaactgatggcaccgggcagcaacatctacagtacgtatcctaatggcagatatcgcacgttgagtggtacaagcatggctactccgcacgttgcgggcgtagctgggctcattcgcgcagccaacccagacatagtggtcgcgcaagcccgtcagattctgcgggataccgcgcaagaagcaggatcgttcacacagtacggctatggaatcgtcgatgctcatgccgccgttgttgctgcatccggtggttcgggcggc

SEQ ID NO: 1488 - protein, 413 aa, synthetic construct
  REGION 1..413: note = Variant of serine peptidase from Bacillus sinesaloumensis
MADQASQANGNQDVIEGELIVSVEPKNGKPDVSIQSAQSVTGQEDVLKSKGFTIVDTLHVEDSSVKPLVSKNFNKKVVEKMGLVYLVQYSPDQFKSSNIAKKELRKELMDLGFKVRYISENYKMMAIEGTATLQGVHPCQVWHYNMIKAPEAWAITGGSLSVKVAVLDTGIDHNHPSLANFVNTNLGRSFVGGNTMDVQGHGTHVAGTIASYGSVSGVMQSATLIPVKVLDNSGSGSLYGITQGILYAADIDADVINMSLGGGGYNQGMDEATQTAVAQGTIVVAATGNDGASSISYPAAYSSVIAVGSVDQNRVRSSFSNYGSGLELMAPGSNIYSTYPNGRYRTLSGTSMATPHVAGVAGLIRAANPDIVVAQARQILRDTAQEAGSFTQYGYGIVDAHAAVVAASGGSGG

SEQ ID NO: 1489 - DNA, 1239 bp, synthetic construct
  misc_feature 1..1239: note = Variant of serine peptidase from Bacillus sinesaloumensis
  source 1..1239: mol_type = other DNA
atggcagatcaagctagtcaagctaatggaaaccaggacgtcattgaaggcgagctgatcgtttcagtggaaccgaagaacggtaaacctgatgtgagcattcaaagtgcacaatccgtaacagggcaggaagacgtccttaaatcgaaaggctttacgatcgttgataccttgcatgtagaggatagcagcgtcaagccactcgtctcgaagaatttcaataagaaagtggtggagaagatgggactggtgtatcttgttcaatactctccggaccagtttaaaagttccaacattgcgaagaaagaactcagaaaagaattgatggatctgggctttaaagtccgctatataagcgaaaattacaagatgatggcgatcgaaggtacagccactcttcagggcgtgcaccctaatcaagtgtggcactataatatgattaaagctccggaagcgtgggctattacgggtggatccctgagcgttaaagtagcagtcctggatacagggatcgaccataatcacccatccttggccaacttcgtgaatactaatcttggccgctcgtttgttggaggaaacaccatggatgttcaaggtcatggcacacatgttgctggcacgattgcatcttatgggagtgtaagcggagtgatgcagagtgcgacactgatcccggtcaaagtgctcgataattctggcagcgggtccctttacggtattacgcagggcatattgtatgccgccgacatcgatgcagacgtcattaacatgtctctgggtggaggaggctataatcagggcatggatgaggctactcaaacagcagttgctcagggaaccattgtagtagcagcgactggcaatgatggtgcatcgtcgatcagttatcctgctgcctacagcagcgtcattgcggtgggatctgtggaccaaaatcgtgttcgatcctcgttttctaactatggatctgggcttgaactgatggcaccgggcagcaacatctacagtacgtatcctaatggcagatatcgcacgttgagtggtacaagcatggctactccgcacgttgcgggcgtagctgggctcattcgcgcagccaacccagacatagtggtcgcgcaagcccgtcagattctgcgggataccgcgcaagaagcaggatcgttcacacagtacggctatggaatcgtcgatgctcatgccgccgttgttgctgcatccggtggttcgggcggc

SEQ ID NO: 1490 - protein, 413 aa, synthetic construct
  REGION 1..413: note = Variant of serine peptidase from Bacillus sinesaloumensis
MADQASQANGNQDVIEGELIVSVEPKNGKPDVSIQSAQSVTGQEDVLKSKGFTIVDTLHVEDSSVKPLVSKNFNKKVVEKMGLVYLVQYSPDQFKSSNIAKKELRKELMDLGFKVRYISENYKMMAIEGTATLQGVHPNQVWHYNMIKAPEAWAITGGSLSVKVAVLDTGIDHNHPSLANFVNTNLGRSFVGGNTMDVQGHGTHVAGTIASYGSVSGVMQSATLIPVKVLDNSGSGSLYGITQGILYAADIDADVINMSLGGGGYNQGMDEATQTAVAQGTIVVAATGNDGASSISYPAAYSSVIAVGSVDQNRVRSSFSNYGSGLELMAPGSNIYSTYPNGRYRTLSGTSMATPHVAGVAGLIRAANPDIVVAQARQILRDTAQEAGSFTQYGYGIVDAHAAVVAASGGSGG

SEQ ID NO: 1491 - DNA, 1239 bp, synthetic construct
  misc_feature 1..1239: note = Variant of serine peptidase from Bacillus sinesaloumensis
  source 1..1239: mol_type = other DNA
atggcagatcaagctagtcaagctaatggaaaccaggacgtcattgaaggcgagctgatcgtttcagtggaaccgaagaacggtaaacctgatgtgagcattcaaagtgcacaatccgtaacagggcaggaagacgtccttaaatcgaaaggctttacgatcgttgataccttgcatgtagaggatagcagcgtcaagccactcgtctcgaagaatttcaataagaaagtggtggagaagatgggactggtgtatcttgttcaatactctccggaccagtttaaaagttccaacattgcgaagaaagaactcagaaaagaattgatggatctgggctttaaagtccgctatataagcgaaaattacaagatgatggcgatcgaaggtacagccactcttcagggcgtgcaccctaatcaagtgtgggcctataatatgattaaagctccggaagcgtgggctattacgggtggatcctcgagcgttaaagtagcagtcctggatacagggatcgaccataatcacccatccttggccaacttcgtgaatactaatcttggccgctcgtttgttggaggaaacaccatggatgttcaaggtcatggcacacatgttgctggcacgattgcatcttatgggagtgtaagcggagtgatgcagagtgcgacactgatcccggtcaaagtgctcgataattctggcagcgggtccctttacggtattacgcagggcatattgtatgccgccgacatcgatgcagacgtcattaacatgtctctgggtggaggaggctataatcagggcatggatgaggctactcaaacagcagttgctcagggaaccattgtagtagcagcgactggcaatgatggtgcatcgtcgatcagttatcctgctgcctacagcagcgtcattgcggtgggatctgtggacagtaatcgtgtacgatcctcgttttctaactatggatctgggcttgaactgatggcaccgggcagcaacatctacagtacgtatcctaatggcagatatcgcacgttgagtggtacaagcatggctactccgcacgttgcgggcgtagctgggctcattcgcgcagccaacccagacataagcgtcgcgcaagcccgtcagattctgcgggataccgcgcaagaagcaggatcgttcacacagtacggctatggaatcgtcgatgctcatgccgccgttgttgctgcatccggtggttcgggcggc

SEQ ID NO: 1492 - protein, 413 aa, synthetic construct
  REGION 1..413: note = Variant of serine peptidase from Bacillus sinesaloumensis
MADQASQANGNQDVIEGELIVSVEPKNGKPDVSIQSAQSVTGQEDVLKSKGFTIVDTLHVEDSSVKPLVSKNFNKKVVEKMGLVYLVQYSPDQFKSSNIAKKELRKELMDLGFKVRYISENYKMMAIEGTATLQGVHPNQVWAYNMIKAPEAWAITGGSSSVKVAVLDTGIDHNHPSLANFVNTNLGRSFVGGNTMDVQGHGTHVAGTIASYGSVSGVMQSATLIPVKVLDNSGSGSLYGITQGILYAADIDADVINMSLGGGGYNQGMDEATQTAVAQGTIVVAATGNDGASSISYPAAYSSVIAVGSVDSNRVRSSFSNYGSGLELMAPGSNIYSTYPNGRYRTLSGTSMATPHVAGVAGLIRAANPDISVAQARQILRDTAQEAGSFTQYGYGIVDAHAAVVAASGGSGG

SEQ ID NO: 1493 - DNA, 1239 bp, synthetic construct
  misc_feature 1..1239: note = Variant of serine peptidase from Bacillus sinesaloumensis
  source 1..1239: mol_type = other DNA
atggcagatcaagctagtcaagctaatggaaaccaggacgtcattgaaggcgagctgatcgtttcagtggaaccgaagaacggtaaacctgatgtgagcattcaaagtgcacaatccgtaacagggcaggaagacgtccttaaatcgaaaggctttacgatcgttgataccttgcatgtagaggatagcagcgtcaagccactcgtctcgaagaatttcaataagaaagtggtggagaagatgggactggtgtatcttgttcaatactctccggaccagtttaaaagttccaacattgcgaagaaagaactcagaaaagaattgatggatctgggctttaaagtccgctatataagcgaaaattacaagatgatggcgatcgaaggtacagccactcttcagggcgtgcacccttgccaagtgtggcactataatatgattaaagctccggaagcgtgggctattacgggcggatccctgagcgttaaagtagcagtcctggatacagggatcgaccataatcacccatccttggccaacttcgtgaatactaatcttggccgctcgtttgttggaggaaacaccatggatgttcaaggtcatggcacacatgttgctggcacgattgcatcttatgggagtgtaagcggagtgatgcagagtgcgacactgatcccggtcaaagtgctcgataattctggcagcgggtccctttacggtattacgcagggcatattgtatgccgccgacatcgatgcagacgtcattaacatgtctctgggtggaggaggctataatcagggcatggatgaggctgttcaaacagcagttgctcagggaaccattgtagtagcagcgactggcaatgatggtgcatcgtcgatcagttatcctgctgcctacagcagcgtcattgcggtgggatctgtggaccaaaatcgtgttcgatcctcgttttctaactatggatctgggcttgaagtgatggcaccgggcagcaacatctacagtacgtatcctaatggcagatatcgcacgttgagtggtacaagcatggctactccgcacgttgcgggcgtagctgggctcattcgcgcagccaacccagacatagtggtcgcgcaagcccgtcagattctgcgggataccgcgcaagaagcaggatcgttcacacagtacggctatggaatcgtcgatgctcatgccgccgttgttgctgcatccggtggttcgggcggc

SEQ ID NO: 1494 - protein, 413 aa, synthetic construct
  REGION 1..413: note = Variant of serine peptidase from Bacillus sinesaloumensis
MADQASQANGNQDVIEGELIVSVEPKNGKPDVSIQSAQSVTGQEDVLKSKGFTIVDTLHVEDSSVKPLVSKNFNKKVVEKMGLVYLVQYSPDQFKSSNIAKKELRKELMDLGFKVRYISENYKMMAIEGTATLQGVHPCQVWHYNMIKAPEAWAITGGSLSVKVAVLDTGIDHNHPSLANFVNTNLGRSFVGGNTMDVQGHGTHVAGTIASYGSVSGVMQSATLIPVKVLDNSGSGSLYGITQGILYAADIDADVINMSLGGGGYNQGMDEAVQTAVAQGTIVVAATGNDGASSISYPAAYSSVIAVGSVDQNRVRSSFSNYGSGLEVMAPGSNIYSTYPNGRYRTLSGTSMATPHVAGVAGLIRAANPDIVVAQARQILRDTAQEAGSFTQYGYGIVDAHAAVVAASGGSGG

SEQ ID NO: 1495 - DNA, 1239 bp, synthetic construct
  misc_feature 1..1239: note = Variant of serine peptidase from Bacillus sinesaloumensis
  source 1..1239: mol_type = other DNA
atggcagatcaagctagtcaagctaatggaaaccaggacgtcattgaaggcgagctgatcgtttcagtggaaccgaagaacggtaaacctgatgtgagcattcaaagtgcacaatccgtaacagggcaggaagacgtccttaaatcgaaaggctttacgatcgttgataccttgcatgtagaggatagcagcgtcaagccactcgtctcgaagaatttcaataagaaagtggtggagaagatgggactggtgtatcttgttcaatactctccggaccagtttaaaagttccaacattgcgaagaaagaactcagaaaagaattgatggatctgggctttaaagtccgctatataagcgaaaattacaagatgatggcgatcgaaggtacagccactcttcagggggtgcacccttgtcaagtttgggcgtataatatgattaaagctccggaagcgtgggctattacgggcggatccctgagcgttaaagtagcagtcctggatacagggatcgaccataatcacccatccttggccaacttcgtgaatactaatcttggccgctcgtttgttggaggaaacaccatggatgttcaaggtcatggcacacatgttgctggcacgattgcatcttatgggagtgtaagcggagtgatgcagagtgcgacactgatcccggtcaaagtgctcgataattctggcagcgggtccctttacggtattacgcagggcatattgtatgccgccgacatcgatgcagacgtcattaacatgtctctgggtggaggaggctataatcagggcatggatgaggctactcaaacagcagttgctcagggaaccattgtagtagcagcgactggcaatgatggtgcatcgtcgatcagttatcctgctgcctacagcagcgtcattgcggtgggatctgtggaccaaaatcgtgttcgatcctcgttttctaactatggatctgggcttgaactgatggcaccgggcagcaacatctacagtacgtatcctaatggcagatatcgctcgttgagtggtacaagcatggctactccgcacgttgcgggcgtagctgggctcattcgcgcagccaacccagacatagtagtcgcgcaagcccgtcagattctgcgggataccgcgcaagaagcaggatcgttcacacagtacggctatggaatcgtcgatgctcatgccgccgttgttgctgcatccggtggttcgggcggc

SEQ ID NO: 1496 - protein, 413 aa, synthetic construct
  REGION 1..413: note = Variant of serine peptidase from Bacillus sinesaloumensis
MADQASQANGNQDVIEGELIVSVEPKNGKPDVSIQSAQSVTGQEDVLKSKGFTIVDTLHVEDSSVKPLVSKNFNKKVVEKMGLVYLVQYSPDQFKSSNIAKKELRKELMDLGFKVRYISENYKMMAIEGTATLQGVHPCQVWAYNMIKAPEAWAITGGSLSVKVAVLDTGIDHNHPSLANFVNTNLGRSFVGGNTMDVQGHGTHVAGTIASYGSVSGVMQSATLIPVKVLDNSGSGSLYGITQGILYAADIDADVINMSLGGGGYNQGMDEATQTAVAQGTIVVAATGNDGASSISYPAAYSSVIAVGSVDQNRVRSSFSNYGSGLELMAPGSNIYSTYPNGRYRSLSGTSMATPHVAGVAGLIRAANPDIVVAQARQILRDTAQEAGSFTQYGYGIVDAHAAVVAASGGSGG

SEQ ID NO: 1497 - DNA, 1239 bp, synthetic construct
  misc_feature 1..1239: note = Variant of serine peptidase from Bacillus sinesaloumensis
  source 1..1239: mol_type = other DNA
atggcagatcaagctagtcaagctaatggaaaccaggacgtcattgaaggcgagctgatcgtttcagtggaaccgaagaacggtaaacctgatgtgagcattcaaagtgcacaatccgtaacagggcaggaagacgtccttaaatcgaaaggctttacgatcgttgataccttgcatgtagaggatagcagcgtcaagccactcgtctcgaagaatttcaataagaaagtggtggagaagatgggactggtgtatcttgttcaatactctccggaccagtttaaaagttccaacattgcgaagaaagaactcagaaaagaattgatggatctgggctttaaagtccgctatataagcgaaaattacaagatgatggcgatcgaaggtacagccactcttcaggccgtgcaccctaatcaagtgtgggcctataatatgattaaagctccggaagcgtgggctattacgggtggatcctcgagcgttaaagtagcagtcctggatacagggatcgaccataatcacccatccttggccaacttcgtgaatactaatcttggccgctcgtttgttggaggaaacaccatggatgttcaaggtcatggcacacatgttgctggcacgattgcatcttatgggagtgtaagcggagtgatgcagagtgcgacactgatcccggtcaaagtgctcgataattctggcagcgggtccctttacggtattacgcagggcatattgtatgccgccgacatcgatgcagacgtcattaacatgtctctgggtggaggaggctataatcagagcatggatgaggctacgcaaacagcagttgctcagggaaccattgtagtagcagcgactggcaatgatggtgcatcgtcgatcagttatcctgctgcctacagcagcgtcattgcggtgggatctgtggacagtaatcgtgtacgatcctcgttttctaactatggatctgggcttgaactgatggcaccgggcagcaacatctacagtacgtatcctaatagcagatatcgctcgttgagtggtacaagcatggctactccgcacgttgcgggcgtagctgggctcattcgcgcagccaacccagacatagtagtcgcgcaagcccgtcagattctgcgggataccgcgcaagaagcaggatcgttcacacagtacggctatggaatcgtcgatgctcatgccgccgttgttgctgcatccggtggttcgggcggc

SEQ ID NO: 1498 - protein, 413 aa, synthetic construct
  REGION 1..413: note = Variant of serine peptidase from Bacillus sinesaloumensis
MADQASQANGNQDVIEGELIVSVEPKNGKPDVSIQSAQSVTGQEDVLKSKGFTIVDTLHVEDSSVKPLVSKNFNKKVVEKMGLVYLVQYSPDQFKSSNIAKKELRKELMDLGFKVRYISENYKMMAIEGTATLQAVHPNQVWAYNMIKAPEAWAITGGSSSVKVAVLDTGIDHNHPSLANFVNTNLGRSFVGGNTMDVQGHGTHVAGTIASYGSVSGVMQSATLIPVKVLDNSGSGSLYGITQGILYAADIDADVINMSLGGGGYNQSMDEATQTAVAQGTIVVAATGNDGASSISYPAAYSSVIAVGSVDSNRVRSSFSNYGSGLELMAPGSNIYSTYPNSRYRSLSGTSMATPHVAGVAGLIRAANPDIVVAQARQILRDTAQEAGSFTQYGYGIVDAHAAVVAASGGSGG

SEQ ID NO: 1499 - DNA, 1239 bp, synthetic construct
  misc_feature 1..1239: note = Variant of serine peptidase from Bacillus sinesaloumensis
  source 1..1239: mol_type = other DNA
atggcagatcaagctagtcaagctaatggaaaccaggacgtcattgaaggcgagctgatcgtttcagtggaaccgaagaacggtaaacctgatgtgagcattcaaagtgcacaatccgtaacagggcaggaagacgtccttaaatcgaaaggctttacgatcgttgataccttgcatgtagaggatagcagcgtcaagccactcgtctcgaagaatttcaataagaaagtggtggagaagatgggactggtgtatcttgttcaatactctccggaccagtttaaaagttccaacattgcgaagaaagaactcagaaaagaattgatggatctgggctttaaagtccgctatataagcgaaaattacaagatgatggcgatcgaaggtacagccactcttcagggcgtgcaccctaatcaaaattgggcctataatatgattaaagctccggaagcgtgggctattacgggcggatccctgagcgttaaagtagcagtcctggatacagggatcgaccataatcacccatccttggccaacttcgtgaatactaatcttggccgctcgtttgttggaggaaacaccatggatgttcaaggtcatggcacacatgttgctggcacgattgcatcttatgggagtgtaagcggagtgatgcagagtgcgacactgatcccggtcaaagtgctcgataattctggcagcgggtccctttacggtattacgcagggcatattgtatgccgccgacatcgatgcagacgtcattaacatgtctctgggtggaggaggctataatcagggcatggatgaggctgttcaaacagcagttgctcagggaaccattgtagtagcagcgactggcaatgatggtgcatcgtcgatcagttatcctgctgcctacagcagcgtcattgcggtgggatctgtggaccaaaatcgtgttcgatcctcgttttctaactatggatctgggcttgaactgatggcaccgggcagcaacatctacagtacgtatcctaatggcagatatcgcacgttgagtggtacaagcatggctactccgcacgttgcgggcgtagctgggctcattcgcgcagccaacccagacatagtggtcgcgcaagcccgtcagattctgcgggataccgcgcaagaagcaggatcgttcacacagtacggctatggaatcgtcgatgctcatgccgccgttgttgctgcatccggtggttcgggcggc

SEQ ID NO: 1500 - protein, 413 aa, synthetic construct
  REGION 1..413: note = Variant of serine peptidase from Bacillus sinesaloumensis
MADQASQANGNQDVIEGELIVSVEPKNGKPDVSIQSAQSVTGQEDVLKSKGFTIVDTLHVEDSSVKPLVSKNFNKKVVEKMGLVYLVQYSPDQFKSSNIAKKELRKELMDLGFKVRYISENYKMMAIEGTATLQGVHPNQNWAYNMIKAPEAWAITGGSLSVKVAVLDTGIDHNHPSLANFVNTNLGRSFVGGNTMDVQGHGTHVAGTIASYGSVSGVMQSATLIPVKVLDNSGSGSLYGITQGILYAADIDADVINMSLGGGGYNQGMDEAVQTAVAQGTIVVAATGNDGASSISYPAAYSSVIAVGSVDQNRVRSSFSNYGSGLELMAPGSNIYSTYPNGRYRTLSGTSMATPHVAGVAGLIRAANPDIVVAQARQILRDTAQEAGSFTQYGYGIVDAHAAVVAASGGSGG

SEQ ID NO: 1501 - DNA, 1239 bp, synthetic construct
  misc_feature 1..1239: note = Variant of serine peptidase from Bacillus sinesaloumensis
  source 1..1239: mol_type = other DNA
atggcagatcaagctagtcaagctaatggaaaccaggacgtcattgaaggcgagctgatcgtttcagtggaaccgaagaacggtaaacctgatgtgagcattcaaagtgcacaatccgtaacagggcaggaagacgtccttaaatcgaaaggctttacgatcgttgataccttgcatgtagaggatagcagcgtcaagccactcgtctcgaagaatttcaataagaaagtggtggagaagatgggactggtgtatcttgttcaatactctccggaccagtttaaaagttccaacattgcgaagaaagaactcagaaaagaattgatggatctgggctttaaagtccgctatataagcgaaaattacaagatgatggcgatcgaaggtacagccactcttcaggccgtgcacccttgccaaaattggcactataatatgattaaagctccggaagcgtgggctattacgggtggatccctgagcgttaaagtagcagtcctggatacagggatcgaccataatcacccatccttggccaacttcgtgaatactaatcttggccgctcgtttgttggaggaaacaccatggatgttcaaggtcatggcacacatgttgctggcacgattgcatcttatgggagtgtaagcggagtgatgcagagtgcgacactgatcccggtcaaagtgctcgataattctggcagcgggtccctttacggtattacgcagggcatattgtatgccgccgacatcgatgcagacgtcattaacatgtctctgggtggaggaggctataatcagagcatggatgaggctgttcaaacagcagttgctcagggaaccattgtagtagcagcgactggcaatgatggtgcatcgtcgatcagttatcctgctgcctacagcagcgtcattgcggtgggatctgtggacagtaatcgtgtacgatcctcgttttctaactatggatctgggcttgaactgatggcaccgggcagcaacatctacagtacgtatcctaatggcagatatcgcacgttgagtggtacaagcatggctactccgcacgttgcgggcgtagctgggctcattcgcgcagccaacccagacataagcgtcgcgcaagcccgtcagattctgcgggataccgcgcaagaagcaggatcgttcacacagtacggctatggaatcgtcgatgctcatgccgccgttgttgctgcatccggtggttcgggcggc

SEQ ID NO: 1502 - protein, 413 aa, synthetic construct
  REGION 1..413: note = Variant of serine peptidase from Bacillus sinesaloumensis
MADQASQANGNQDVIEGELIVSVEPKNGKPDVSIQSAQSVTGQEDVLKSKGFTIVDTLHVEDSSVKPLVSKNFNKKVVEKMGLVYLVQYSPDQFKSSNIAKKELRKELMDLGFKVRYISENYKMMAIEGTATLQAVHPCQNWHYNMIKAPEAWAITGGSLSVKVAVLDTGIDHNHPSLANFVNTNLGRSFVGGNTMDVQGHGTHVAGTIASYGSVSGVMQSATLIPVKVLDNSGSGSLYGITQGILYAADIDADVINMSLGGGGYNQSMDEAVQTAVAQGTIVVAATGNDGASSISYPAAYSSVIAVGSVDSNRVRSSFSNYGSGLELMAPGSNIYSTYPNGRYRTLSGTSMATPHVAGVAGLIRAANPDISVAQARQILRDTAQEAGSFTQYGYGIVDAHAAVVAASGGSGG

SEQ ID NO: 1503 - DNA, 1239 bp, synthetic construct
  misc_feature 1..1239: note = Variant of serine peptidase from Bacillus sinesaloumensis
  source 1..1239: mol_type = other DNA
atggcagatcaagctagtcaagctaatggaaaccaggacgtcattgaaggcgagctgatcgtttcagtggaaccgaagaacggtaaacctgatgtgagcattcaaagtgcacaatccgtaacagggcaggaagacgtccttaaatcgaaaggctttacgatcgttgataccttgcatgtagaggatagcagcgtcaagccactcgtctcgaagaatttcaataagaaagtggtggagaagatgggactggtgtatcttgttcaatactctccggaccagtttaaaagttccaacattgcgaagaaagaactcagaaaagaattgatggatctgggctttaaagtccgctatataagcgaaaattacaagatgatggcgatcgaaggtacagccactcttcagggcgtgcaccctaatcaaaattggcactataatatgattaaagctccggaagcgtgggctattacgggtggatccctgagcgttaaagtagcagtcctggatacagggatcgaccataatcacccatccttggccaacttcgtgaatactaatcttggccgctcgtttgttggaggaaacaccatggatgttcaaggtcatggcacacatgttgctggcacgattgcatcttatgggagtgtaagcggagtgatgcagagtgcgacactgatcccggtcaaagtgctcgataattctggcagcgggtccctttacggtattacgcagggcatattgtatgccgccgacatcgatgcagacgtcattaacatgtctctgggtggaggaggctataatcagggcatggatgaggctacgcaaacagcagttgctcagggaaccattgtagtagcagcgactggcaatgatggtgcatcgtcgatcagttatcctgctgcctacagcagcgtcattgcggtgggatctgtgacgcagaatcgtgtacgatcctcgttttctaactatggatctgggcttgaactgatggcaccgggcagcaacatctacagtacgtatcctaatggcagatatcgcacgttgagtggtacaagcatggctactccgcacgttgcgggcgtagctgggctcattcgcgcagccaacccagacatagtggtcgcgcaagcccgtcagattctgcgggataccgcgcaagaagcaggatcgttcacacagtacggctatggaatcgtcgatgctcatgccgccgttgttgctgcatccggtggttcgggcggc

SEQ ID NO: 1504 - protein, 413 aa, synthetic construct
  REGION 1..413: note = Variant of serine peptidase from Bacillus sinesaloumensis
MADQASQANGNQDVIEGELIVSVEPKNGKPDVSIQSAQSVTGQEDVLKSKGFTIVDTLHVEDSSVKPLVSKNFNKKVVEKMGLVYLVQYSPDQFKSSNIAKKELRKELMDLGFKVRYISENYKMMAIEGTATLQGVHPNQNWHYNMIKAPEAWAITGGSLSVKVAVLDTGIDHNHPSLANFVNTNLGRSFVGGNTMDVQGHGTHVAGTIASYGSVSGVMQSATLIPVKVLDNSGSGSLYGITQGILYAADIDADVINMSLGGGGYNQGMDEATQTAVAQGTIVVAATGNDGASSISYPAAYSSVIAVGSVTQNRVRSSFSNYGSGLELMAPGSNIYSTYPNGRYRTLSGTSMATPHVAGVAGLIRAANPDIVVAQARQILRDTAQEAGSFTQYGYGIVDAHAAVVAASGGSGG

SEQ ID NO: 1505 - DNA, 1239 bp, synthetic construct
  misc_feature 1..1239: note = Variant of serine peptidase from Bacillus sinesaloumensis
  source 1..1239: mol_type = other DNA
atggcagatcaagctagtcaagctaatggaaaccaggacgtcattgaaggcgagctgatcgtttcagtggaaccgaagaacggtaaacctgatgtgagcattcaaagtgcacaatccgtaacagggcaggaagacgtccttaaatcgaaaggctttacgatcgttgataccttgcatgtagaggatagcagcgtcaagccactcgtctcgaagaatttcaataagaaagtggtggagaagatgggactggtgtatcttgttcaatactctccggaccagtttaaaagttccaacattgcgaagaaagaactcagaaaagaattgatggatctgggctttaaagtccgctatataagcgaaaattacaagatgatggcgatcgaaggtacagccactcttcagggcgtgcaccctaatcaagtgtgggcctataatatgattaaagctccggaagcgtgggctattacgagtggatccctgagcgttaaagtagcagtcctggatacagggatcgaccataatcacccatccttggccaacttcgtgaatactaatcttggccgctcgtttgttggaggaaacaccatggatgttcaaggtcatggcacacatgttgctggcacgattgcatcttatgggagtgtaagcggagtgatgcagagtgcgacactgatcccggtcaaagtgctcgataattctggcagcgggtccctttacggtattacgcagggcatattgtatgccgccgacatcgatgcagacgtcattaacatgtctctgggtggaggaggctataatcagagcatggatgaggctacgcaaacagcagttgctcagggaaccattgtagtagcagcgactggcaatgatggtgcatcgtcgatcagttatcctgctgcctacagcagcgtcattgcggtgggatctgtggaccagaatcgtgtacgatcctcgttttctaactatggatctgggcttgaagtgatggcaccgggcagcaacatctacagtacgtatcctaatggcagatatcgctcgttgagtggtacaagcatggctactccgcacgttgcgggcgtagctgggctcattcgcgcagccaacccagacataagcgtcgcgcaagcccgtcagattctgcgggataccgcgcaagaagcaggatcgttcacacagtacggctatggaatcgtcgatgctcatgccgccgttgttgctgcatccggtggttcgggcggc

SEQ ID NO: 1506 - protein, 413 aa, synthetic construct
  REGION 1..413: note = Variant of serine peptidase from Bacillus sinesaloumensis
MADQASQANGNQDVIEGELIVSVEPKNGKPDVSIQSAQSVTGQEDVLKSKGFTIVDTLHVEDSSVKPLVSKNFNKKVVEKMGLVYLVQYSPDQFKSSNIAKKELRKELMDLGFKVRYISENYKMMAIEGTATLQGVHPNQVWAYNMIKAPEAWAITSGSLSVKVAVLDTGIDHNHPSLANFVNTNLGRSFVGGNTMDVQGHGTHVAGTIASYGSVSGVMQSATLIPVKVLDNSGSGSLYGITQGILYAADIDADVINMSLGGGGYNQSMDEATQTAVAQGTIVVAATGNDGASSISYPAAYSSVIAVGSVDQNRVRSSFSNYGSGLEVMAPGSNIYSTYPNGRYRSLSGTSMATPHVAGVAGLIRAANPDISVAQARQILRDTAQEAGSFTQYGYGIVDAHAAVVAASGGSGG

SEQ ID NO: 1507 - DNA, 1239 bp, synthetic construct
  misc_feature 1..1239: note = Variant of serine peptidase from Bacillus sinesaloumensis
  source 1..1239: mol_type = other DNA
atggcagatcaagctagtcaagctaatggaaaccaggacgtcattgaaggcgagctgatcgtttcagtggaaccgaagaacggtaaacctgatgtgagcattcaaagtgcacaatccgtaacagggcaggaagacgtccttaaatcgaaaggctttgcgatcgttgataccttgcatgtagaggatagcagcgtcaagccactcgtctcgaagaatttcaataagaaagtggtggagaagatgggactggtgtatcttgttcaatactctccggaccagtttaaaagttccaacattgcgaagaaagaactcagaaaagaattgatggatctgggctttaaagtccgctatataagcgaaaattacaagatgatggcgatcgaaggtacagccactcttcagggcgtgcaccctaatcaaaattggcactataatatgattaaagctccggaagcgtgggctattacgggtggatccctgagcgttaaagtagcagtcctggatacagggatcgaccataatcacccatccttggccaacttcgtgaatactaatcttggccgctcgtttgttggaggaaacaccatggatgttcaaggtcatggcacacatgttgctggcacgattgcatcttatgggagtgtaagcggagtgatgcagagtgcgacactgatcccagtcaaagtgctcgataattctggcagcgggtccctttacggtattacgcagggcatattgtatgccgccgacatcgatgcagacgtcattaacatgtctctgggtggaggaggctataatcagggcatggatgaggctgttcaaacagcagttgctcagggaaccattgtagtagcagcgactggcaatgatggtgcatcgtcgatcagttatcctgctgcctacagcagcgtcattgcggtgggatctgtggaccagaatcgtgtacgatcctcgttttctaactatggatctgggcttgaactgatggcaccgggcagcaacatctacagtacgtatcctaatggcagatatcgcacgttgagtggtacaagcatggctactccgcacgttgcgggcgtagctgggctcattcgcgcagccaacccagacataagcgtcgcgcaagcccgtcagattctgcgggataccgcgcaagaagcaggatcgttcacacagtacggctatggaatcgtcgatgctcatgccgccgttgttgctgcatccggtggttcgggcggc

SEQ ID NO: 1508 - protein, 413 aa, synthetic construct
  REGION 1..413: note = Variant of serine peptidase from Bacillus sinesaloumensis
MADQASQANGNQDVIEGELIVSVEPKNGKPDVSIQSAQSVTGQEDVLKSKGFAIVDTLHVEDSSVKPLVSKNFNKKVVEKMGLVYLVQYSPDQFKSSNIAKKELRKELMDLGFKVRYISENYKMMAIEGTATLQGVHPNQNWHYNMIKAPEAWAITGGSLSVKVAVLDTGIDHNHPSLANFVNTNLGRSFVGGNTMDVQGHGTHVAGTIASYGSVSGVMQSATLIPVKVLDNSGSGSLYGITQGILYAADIDADVINMSLGGGGYNQGMDEAVQTAVAQGTIVVAATGNDGASSISYPAAYSSVIAVGSVDQNRVRSSFSNYGSGLELMAPGSNIYSTYPNGRYRTLSGTSMATPHVAGVAGLIRAANPDISVAQARQILRDTAQEAGSFTQYGYGIVDAHAAVVAASGGSGG

SEQ ID NO: 1509 - DNA, 1239 bp, synthetic construct
  misc_feature 1..1239: note = Variant of serine peptidase from Bacillus sinesaloumensis
  source 1..1239: mol_type = other DNA
atggcagatcaagctagtcaagctaatggaaaccaggacgtcattgaaggcgagctgatcgtttcagtggaaccgaagaacggtaaacctgatgtgagcattcaaagtgcacaatccgtaacagggcaggaagacgtccttaaatcgaaaggctttacgatcgttgataccttgcatgtagaggatagcagcgtcaagccactcgtctcgaagaatttcaataagaaagtggtggagaagatgggactggtgtatcttgttcaatactctccggaccagtttaaaagttccaacattgcgaagaaagaactcagaaaagaattgatggatctgggctttaaagtccgctatataagcgaaaattacaagatgatggcgatcgaaggtacagccactcttcagggcgtgcaccctaatcaagtgtgggcctataatatgattaaagctccggaagcgtgggctattacgggcggatccctgagcgttaaagtagcagtcctggatacagggatcgaccataatcacccatccttggccaacttcgtgaatactaatcttggccgctcgtttgttggaggaaacaccatggatgttcaaggtcatggcacacatgttgctggcacgattgcatcttatgggagtgtaagcggagtgatgcagagtgcgacactgatcccggtcaaagtgctcgataattctggcagcgggtccctttacggtattacgcagggcatattgtatgccgccgacatcgatgcagacgtcattaacatgtctctgggtggaggaggctataatcagggcatggatgaggctacgcaaacagcagttgctcagggaaccattgtagtagcagcgactggcaatgatggtgcatcgtcgatcagttatcctgctgcctacagcagcgtcattgcggtgggatctgtggaccagaatcgtgtacgatcctcgttttctaactatggatctgggcttgaactgatggcaccgggcagcaacatctacagtacgtatcctaatggcagatatcgcacgttgagtggtacaagcatggctactccgcacgttgcgggcgtagctgggctcattcgcgcagccaacccagacatagtagtcgcgcaagcccgtcagattctgcgggataccgcgcaagaagcaggatcgttcacacagtacggctatggaatcgtcgatgctcatgccgccgttgttgctgcatccggtggttcgggcggc

SEQ ID NO: 1510 - protein, 413 aa, synthetic construct
  REGION 1..413: note = Variant of serine peptidase from Bacillus sinesaloumensis
MADQASQANGNQDVIEGELIVSVEPKNGKPDVSIQSAQSVTGQEDVLKSKGFTIVDTLHVEDSSVKPLVSKNFNKKVVEKMGLVYLVQYSPDQFKSSNIAKKELRKELMDLGFKVRYISENYKMMAIEGTATLQGVHPNQVWAYNMIKAPEAWAITGGSLSVKVAVLDTGIDHNHPSLANFVNTNLGRSFVGGNTMDVQGHGTHVAGTIASYGSVSGVMQSATLIPVKVLDNSGSGSLYGITQGILYAADIDADVINMSLGGGGYNQGMDEATQTAVAQGTIVVAATGNDGASSISYPAAYSSVIAVGSVDQNRVRSSFSNYGSGLELMAPGSNIYSTYPNGRYRTLSGTSMATPHVAGVAGLIRAANPDIVVAQARQILRDTAQEAGSFTQYGYGIVDAHAAVVAASGGSGG

SEQ ID NO: 1511 - DNA, 1239 bp, synthetic construct
  misc_feature 1..1239: note = Variant of serine peptidase from Bacillus sinesaloumensis
  source 1..1239: mol_type = other DNA
atggcagatcaagctagtcaagctaatggaaaccaggacgtcattgaaggcgagctgatcgtttcagtggaaccgaagaacggtaaacctgatgtgagcattcaaagtgcacaatccgtaacagggcaggaagacgtccttaaatcgaaaggctttacgatcgttgataccttgcatgtagaggatagcagcgtcaagccactcgtctcgaagaatttcaataagaaagtggtggagaagatgggactggtgtatcttgttcaatactctccggaccagtttaaaagttccaacattgcgaagaaagaactcagaaaagaattgatggatctgggctttaaagtccgctatataagcgaaaattacaagatgatggcgatcgaaggtacagccactcttcagggcgtgcaccctaatcaaaattggcactataatatgattaaagctccggaagcgtgggctattacgggtggatccctgagcgttaaagtagcagtcctggatacagggatcgaccataatcacccatccttggccaacttcgtgaatactaatcttggccgctcgtttgttggaggaaacaccatggatgttcaaggtcatggcacacatgttgctggcacgattgcatcttatgggagtgtaagcggagtgatgcagagtgcgacactgatcccggtcaaagtgctcgataattctggcagcgggtccctttacggtattacgcagggcatattgtatgccgccgacatcgatgcagacgtcattaacatgtctctgggtggaggaggctataatcagggcatggatgaggctgttcaaacagcagttgctcagggaaccattgtagtagcagcgactggcaatgatggtgcatcgtcgatcagttatcctgctgcctacagcagcgtcattgcggtgggatctgtggacagtaatcgtgtacgatcctcgttttctaactatggatctgggcttgaactgatggcaccgggcagcaacatctacagtacgtatcctaatggcagatatcgcacgttgagtggtacaagcatggctactccgcacgttgcgggcgtagctgggctcattcgcgcagccaacccagacatagtggtcgcgcaagcccgtcagattctgcgggataccgcgcaagaagcaggatcgttcacacagtacggctatggaatcgtcgatgctcatgccgccgttgttgctgcatccggtggttcgggcggc

SEQ ID NO: 1512 - protein, 413 aa, synthetic construct
  REGION 1..413: note = Variant of serine peptidase from Bacillus sinesaloumensis
MADQASQANGNQDVIEGELIVSVEPKNGKPDVSIQSAQSVTGQEDVLKSKGFTIVDTLHVEDSSVKPLVSKNFNKKVVEKMGLVYLVQYSPDQFKSSNIAKKELRKELMDLGFKVRYISENYKMMAIEGTATLQGVHPNQNWHYNMIKAPEAWAITGGSLSVKVAVLDTGIDHNHPSLANFVNTNLGRSFVGGNTMDVQGHGTHVAGTIASYGSVSGVMQSATLIPVKVLDNSGSGSLYGITQGILYAADIDADVINMSLGGGGYNQGMDEAVQTAVAQGTIVVAATGNDGASSISYPAAYSSVIAVGSVDSNRVRSSFSNYGSGLELMAPGSNIYSTYPNGRYRTLSGTSMATPHVAGVAGLIRAANPDIVVAQARQILRDTAQEAGSFTQYGYGIVDAHAAVVAASGGSGG

SEQ ID NO: 1513 - DNA, 1239 bp, synthetic construct
  misc_feature 1..1239: note = Variant of serine peptidase from Bacillus sinesaloumensis
  source 1..1239: mol_type = other DNA
atggcagatcaagctagtcaagctaatggaaaccaggacgtcattgaaggcgagctgatcgtttcagtggaaccgaagaacggtaaacctgatgtgagcattcaaagtgcacaatccgtaacagggcaggaagacgtccttaaatcgaaaggctttacgatcgttgataccttgcatgtagaggatagcagcgtcaagccactcgtctcgaagaatttcaataagaaagtggtggagaagatgggactggtgtatcttgttcaatactctccggaccagtttaaaagttccaacattgcgaagaaagaactcagaaaagaattgatggatctgggctttaaagtccgctatataagcgaaaattacaagatgatggcgatcgaaggtacagccactcttcagggggtgcatcctctgcaagtttgggcgtataatatgattaaagctccggaagcgtgggctattacgggcggatccctgagcgttaaagtagcagtcctggatacagggatcgaccataatcacccatccttggccaacttcgtgaatactaatcttggccgctcgtttgttggaggaaacaccatggatgttcaaggtcatggcacacatgttgctggcacgattgcatcttatgggagtgtaagcggagtgatgcagagtgcgacactgatcccggtcaaagtgctcgataattctggcagcgggtccctttacggtattacgcagggcatattgtatgccgccgacatcgatgcagacgtcattaacatgtctctgggtggaggaggctataatcagggcatggatgaggctactcaaacagcagttgctcaaggaaccattgtagtagcagcgactggcaatgatggtgcatcgtcgatcagttatcctgctgcctacagcagcgtcattgcggtgggatctgtggaccaaaatcgtgttcgatcctcgttttctaactatggatctgggcttgaactgatggcaccgggcagcaacatctacagtacgtatcctaatggcagatatcgcacgttgagtggtacaagcatggctactccgcacgttgcgggcgtagctgggctcattcgcgcagccaacccagacatagtggtcgcgcaagcccgtcagattctgcgggataccgcgcaagaagcaggatcgttcacacagtacggctatggaatcgtcgatgctcatgccgccgttgttgctgcatccggtggttcgggcggc

SEQ ID NO: 1514 - protein, 413 aa, synthetic construct
  REGION 1..413: note = Variant of serine peptidase from Bacillus sinesaloumensis
MADQASQANGNQDVIEGELIVSVEPKNGKPDVSIQSAQSVTGQEDVLKSKGFTIVDTLHVEDSSVKPLVSKNFNKKVVEKMGLVYLVQYSPDQFKSSNIAKKELRKELMDLGFKVRYISENYKMMAIEGTATLQGVHPLQVWAYNMIKAPEAWAITGGSLSVKVAVLDTGIDHNHPSLANFVNTNLGRSFVGGNTMDVQGHGTHVAGTIASYGSVSGVMQSATLIPVKVLDNSGSGSLYGITQGILYAADIDADVINMSLGGGGYNQGMDEATQTAVAQGTIVVAATGNDGASSISYPAAYSSVIAVGSVDQNRVRSSFSNYGSGLELMAPGSNIYSTYPNGRYRTLSGTSMATPHVAGVAGLIRAANPDIVVAQARQILRDTAQEAGSFTQYGYGIVDAHAAVVAASGGSGG

SEQ ID NO: 1515 - DNA, 1239 bp, synthetic construct
  misc_feature 1..1239: note = Variant of serine peptidase from Bacillus sinesaloumensis
  source 1..1239: mol_type = other DNA
atggcagatcaagctagtcaagctaatggaaaccaggacgtcattgaaggcgagctgatcgtttcagtggaaccgaagaacggtaaacctgatgtgagcattcaaagtgcacaatccgtaacagggcaggaagacgtccttaaatcgaaaggctttacgatcgttgataccttgcatgtagaggatagcagcgtcaagccactcgtctcgaagaatttcaataagaaagtggtggagaagatgggactggtgtatcttgttcaatactctccggaccagtttaaaagttccaacattgcgaagaaagaactcagaaaagaattgatggatctgggctttaaagtccgctatataagcgaaaattacaagatgatggcgatcgaaggtacagccactcttcagggggtggctcctaatcaagtttgggcgtataatatgattaaagctccggaagcgtgggctattacgggcggatccctgagcgttaaagtagcagtcctggatacagggatcgaccataatcacccatccttggccaacttcgtgaatactaatcttggccgctcgtttgttggaggaaacaccatggatgttcaaggtcatggcacacatgttgctggcacgattgcatcttatgggagtgtaagcggagtgatgcagcaggcgacactgatcccggtcaaagtgctcgataatctgggcagcgggtccctttacggtattacgcagggcatattgtatgccgccgacatcgatgcagacgtcattaacatgtctctgggtggaggaggctataatcagggcatggatgaggctactcaaacagcagttgctcagggaaccattgtagtagcagcgactggcaatgatggtgcatcgtcgatcagttatcctgctgcctacagcagcgtcattgcggtgggatctgtggaccagaatcgtgttcgatcctcgttttctaactatggatctgggcttgaactgatggcaccgggcagcaacatctacagtacgtatcctaatggcagatatcgcacgttgagtggtacaagcatggctactccgcacgttgcgggcgtagctgggctcattcgcgcagccaacccagacatagtggtcgcgcaagcccgtcagattctgcgggataccgcgcaagaagcaggatcgttcacacagtacggctatggaatcgtcgatgctcatgccgccgttgttgctgcatccggtggttcgggcgac

SEQ ID NO: 1516 - protein, 413 aa, synthetic construct
  REGION 1..413: note = Variant of serine peptidase from Bacillus sinesaloumensis
MADQASQANGNQDVIEGELIVSVEPKNGKPDVSIQSAQSVTGQEDVLKSKGFTIVDTLHVEDSSVKPLVSKNFNKKVVEKMGLVYLVQYSPDQFKSSNIAKKELRKELMDLGFKVRYISENYKMMAIEGTATLQGVAPNQVWAYNMIKAPEAWAITGGSLSVKVAVLDTGIDHNHPSLANFVNTNLGRSFVGGNTMDVQGHGTHVAGTIASYGSVSGVMQQATLIPVKVLDNLGSGSLYGITQGILYAADIDADVINMSLGGGGYNQGMDEATQTAVAQGTIVVAATGNDGASSISYPAAYSSVIAVGSVDQNRVRSSFSNYGSGLELMAPGSNIYSTYPNGRYRTLSGTSMATPHVAGVAGLIRAANPDIVVAQARQILRDTAQEAGSFTQYGYGIVDAHAAVVAASGGSGD

SEQ ID NO: 1517 - DNA, 1239 bp, synthetic construct
  misc_feature 1..1239: note = Variant of serine peptidase from Bacillus sinesaloumensis
  source 1..1239: mol_type = other DNA
atggcagatcaagctagtcaagctaatggaaaccaggacgtcattgaaggcgagctgatcgtttcagtggaaccgaagaacggtaaacctgatgtgagcattcaaagtgcacaatccgtaacagggcaggaagacgtccttaaatcgaaaggctttacgatcgttgataccttgcatgtagaggatagcagcgtcaagccactcgtctcgaagaatttcaataagaaagtggtggagaagatgggactggtgtatcttgttcaatactctccggaccagtttaaaagttccaacattgcgaagaaagaactcagaaaagaattgatggatctgggctttaaagtccgctatataagcgaaaattacaagatgatggcgatcgaaggtacagccactcttcagggggtgcacccttgtcaagtttgggcgtataatatgattaaagctccggaagcgtgggctattacgggcggatccctgagcgttaaagtagcagtcctggatacagggatcgaccataatcacccatccttggccaacttcgtgaatactaatcttggccgctcgtttgttggaggaaacaccatggatgttcaaggtcatggcacacatgttgctggcacgattgcatcttatgggagtgtaagcggagtgatgcagagtgcgacactgatcccggtcaaagtgctcgataatctgggcagcgggtccctttacggtattacgcagggcatattgtatgccgccgacatcgatgcagacgtcattaacatgtctctgggtggaggaggctataatcagggcatggatgaggctactcaaacagcagttgctcagggaaccattgtagtagcagcgactggcaatgatggtgcatcgtcgatcagttatcctgctgcctacagcagcgtcattgcggtgggatctgtggaccaaaatcgtgttcgatcctcgttttctaactatggatctgggcttgaactgatggcaccgggcagcaacatctacagtacgtatcctaatggcagatatcgcacgttgagtggtacaagcatggctactccgcacgttgcgggcgtagctgggctcattcgcgcagccaacccagacatagtggtcgcgcaagcccgtcagattctgcgggataccgcgcaagaagcaggatcgttcacacagtacggctatggaatcgtcgatgctcatgccgccgttgttgctgcatccggtggttcgggcggc

SEQ ID NO: 1518 - protein, 413 aa, synthetic construct
  REGION 1..413: note = Variant of serine peptidase from Bacillus sinesaloumensis
MADQASQANGNQDVIEGELIVSVEPKNGKPDVSIQSAQSVTGQEDVLKSKGFTIVDTLHVEDSSVKPLVSKNFNKKVVEKMGLVYLVQYSPDQFKSSNIAKKELRKELMDLGFKVRYISENYKMMAIEGTATLQGVHPCQVWAYNMIKAPEAWAITGGSLSVKVAVLDTGIDHNHPSLANFVNTNLGRSFVGGNTMDVQGHGTHVAGTIASYGSVSGVMQSATLIPVKVLDNLGSGSLYGITQGILYAADIDADVINMSLGGGGYNQGMDEATQTAVAQGTIVVAATGNDGASSISYPAAYSSVIAVGSVDQNRVRSSFSNYGSGLELMAPGSNIYSTYPNGRYRTLSGTSMATPHVAGVAGLIRAANPDIVVAQARQILRDTAQEAGSFTQYGYGIVDAHAAVVAASGGSGG

SEQ ID NO: 1519 - DNA, 1239 bp, synthetic construct
  misc_feature 1..1239: note = Variant of serine peptidase from Bacillus sinesaloumensis
  source 1..1239: mol_type = other DNA
atggcagatcaagctagtcaagctaatggaaaccaggacgtcattgaaggcgagctgatcgtttcagtggaaccgaagaacggtaaacctgatgtgagcattcaaagtgcacaatccgtaacagggcaggaagacgtccttaaatcgaaaggctttacgatcgttgataccttgcatgtagaggatagcagcgtcaagccactcgtctcgaagaatttcaataagaaagtggtggagaagatgggactggtgtatcttgttcaatactctccggaccagtttaaaagttccaacattgcgaagaaagaactcagaaaagaattgatggatctgggctttaaagtccgctatataagcgaaaattacaagatgatggcgatcgaaggtacagccactcttcagggggtgcacccttgtcaagtttgggcgtataatatgattaaagctccggaagcgtgggctattacgggcggatccctgagcgttaaagtagcagtcctggatacagggatcgaccataatcacccatccttggccaacttcgtgaatactaatcttggccgctcgtttgttggaggaaacaccatggatgttcaaggtcatggcacacatgttgctggcacgattgcatcttatgggagtgtaagcggagtgatgcagcaggcgacactgatcccggtcaaagtgctcgataattctggcagcgggtccctttacggtattacgcagggcatattgtatgccgccgacatcgatgcagacgtcattaacatgtctctgggtggaggaggctataatcagggcatggatgaggctactcaaacagcagttgctaagggaaccattgtagtagcagcgactggcaatgatggtgcatcgtcgatcagttatcctgctgcctacagcagcgtcattgcggtgggatctgtggaccaaaatcgtgttcgatcctcgttttctaactatggatctgggcttgaactgatggcaccgggcagcaacatctacagtacgtatcctaatggcagatatcgcacgttgagtggtacaagcatggctactccgcacgttgcgggcgtagctgggctcattcgcgcagccaacccagacatagtggtcgcgcaagcccgtcagattctgcgggataccgcgcaagaagcaggatcgttcacacagtacggctatggaatcgtcgatgctcatgccgccgttgttgctgcatccggtggttcgggcggc

SEQ ID NO: 1520 - protein, 413 aa, synthetic construct
  REGION 1..413: note = Variant of serine peptidase from Bacillus sinesaloumensis
MADQASQANGNQDVIEGELIVSVEPKNGKPDVSIQSAQSVTGQEDVLKSKGFTIVDTLHVEDSSVKPLVSKNFNKKVVEKMGLVYLVQYSPDQFKSSNIAKKELRKELMDLGFKVRYISENYKMMAIEGTATLQGVHPCQVWAYNMIKAPEAWAITGGSLSVKVAVLDTGIDHNHPSLANFVNTNLGRSFVGGNTMDVQGHGTHVAGTIASYGSVSGVMQQATLIPVKVLDNSGSGSLYGITQGILYAADIDADVINMSLGGGGYNQGMDEATQTAVAKGTIVVAATGNDGASSISYPAAYSSVIAVGSVDQNRVRSSFSNYGSGLELMAPGSNIYSTYPNGRYRTLSGTSMATPHVAGVAGLIRAANPDIVVAQARQILRDTAQEAGSFTQYGYGIVDAHAAVVAASGGSGG

SEQ ID NO: 1521 - DNA, 1239 bp, synthetic construct
  misc_feature 1..1239: note = Variant of serine peptidase from Bacillus sinesaloumensis
  source 1..1239: mol_type = other DNA
atggcagatcaagctagtcaagctaatggaaaccaggacgtcattgaaggcgagctgatcgtttcagtggaaccgaagaacggtaaacctgatgtgagcattcaaagtgcacaatccgtaacagggcaggaagacgtccttaaatcgaaaggctttacgatcgttgataccttgcatgtagaggatagcagcgtcaagccactcgtctcgaagaatttcaataagaaagtggtggagaagatgggactggtgtatcttgttcaatactctccggaccagtttaaaagttccaacattgcgaagaaagaactcagaaaagaattgatggatctgggctttaaagtccgctatataagcgaaaattacaagatgatggcgatcgaaggtacagccactcttcagggggtgaatcctaatcaagtttgggcgtataatatgattaaagctccggaagcgtgggctattacgggcggatccctgagcgttaaagtagcagtcctggatacagggatcgaccataatcacccatccttggccaacttcgtgaatactaatcttggccgctcgtttgttggaggaaacaccatggatgttcaaggtcatggcacacatgttgctggcacgattgcatcttatgggagtgtaagcggagtgatgcagtcggcgacactgatcccggtcaaagtgctcgataatctgggcagcgggtccctttacggtattacgcagggcatattgtatgccgccgacatcgatgcagacgtcattaacatgtctctgggtggaggaggctataatcagggcatggatgaggctactcaaacagcagttgctatgggaaccattgtagtagcagcgactggcaatgatggtgcatcgtcgatcagttatcctgctgcctacagcagcgtcattgcggtgggatctgtggaccaaaatcgtgttcgatcctcgttttctaactatggatctgggcttgaactgatggcaccgggcagcaacatctacagtacgtatcctaatggcagatatcgcacgttgagtggtacaagcatggctactccgcacgttgcgggcgtagctgggctcattcgcgcagccaacccagacatagtggtcgcgcaagcccgtcagattctgcgggataccgcgcaagaagcaggatcgttcacacagtacggctatggaatcgtcgatgctcatgccgccgttgttgctgcatccggtggttcgggcggc

SEQ ID NO: 1522 - protein, 413 aa, synthetic construct
  REGION 1..413: note = Variant of serine peptidase from Bacillus sinesaloumensis
MADQASQANGNQDVIEGELIVSVEPKNGKPDVSIQSAQSVTGQEDVLKSKGFTIVDTLHVEDSSVKPLVSKNFNKKVVEKMGLVYLVQYSPDQFKSSNIAKKELRKELMDLGFKVRYISENYKMMAIEGTATLQGVNPNQVWAYNMIKAPEAWAITGGSLSVKVAVLDTGIDHNHPSLANFVNTNLGRSFVGGNTMDVQGHGTHVAGTIASYGSVSGVMQSATLIPVKVLDNLGSGSLYGITQGILYAADIDADVINMSLGGGGYNQGMDEATQTAVAMGTIVVAATGNDGASSISYPAAYSSVIAVGSVDQNRVRSSFSNYGSGLELMAPGSNIYSTYPNGRYRTLSGTSMATPHVAGVAGLIRAANPDIVVAQARQILRDTAQEAGSFTQYGYGIVDAHAAVVAASGGSGG

SEQ ID NO: 1523 - DNA, 1239 bp, synthetic construct
  misc_feature 1..1239: note = Variant of serine peptidase from Bacillus sinesaloumensis
  source 1..1239: mol_type = other DNA
atggcagatcaagctagtcaagctaatggaaaccaggacgtcattgaaggcgagctgatcgtttcagtggaaccgaagaacggtaaacctgatgtgagcattcaaagtgcacaatccgtaacagggcaggaagacgtccttaaatcgaaaggctttacgatcgttgataccttgcatgtagaggatagcagcgtcaagccactcgtctcgaagaatttcaataagaaagtggtggagaagatgggactggtgtatcttgttcaatactctccggaccagtttaaaagttccaacattgcgaagaaagaactcagaaaagaattgatggatctgggctttaaagtccgctatataagcgaaaattacaagatgatggcgatcgaaggtacagccactcttcagggggtgcatccttgtcaagtttgggcgtataatatgattaaagctccggaagcgtgggctattacgggcggatccctgagcgttaaagtagcagtcctggatacagggatcgaccataatcacccatccttggccaacttcgtgaatactaatcttggccgctcgtttgttggaggaaacaccatggatgttcaaggtcatggcacacatgttgctggcacgattgcatcttatgggagtgtaagcggagtgatgcagcaggcgacactgatcccggtcaaagtgctcgataattctggcagcgggtccctttacggtattacgcagggcatattgtatgccgccgacatcgatgcagacgtcattaacatgtctctgggtggaggaggctataatcagggcatggatgaggctactcaaacagcagttgctcagggaaccattgtagtagcagcgactggcaatgatggtgcatcgtcgatcagttatcctgctgcctacagcagcgtcattgcggtgggatctgtggaccaaaatcgtgttcgatcctcgttttctaactatggatctgggcttgaactgatggcaccgggcagcaacatctacagtacgtatcctaatggcagatatcgcacgttgagtggtacaagcatggctactccgcacgttgcgggcgtagctgggctcattcgcgcagccaacccagacatagtggtcgcgcaagcccgtcagattctgcgggataccgcgcaagaagcaggatcgttcacacagtacggctatggaatcgtcgatgctcatgccgccgttgttgctgcatccggtggttcgggcggc

SEQ ID NO: 1524 - protein, 413 aa, synthetic construct
  REGION 1..413: note = Variant of serine peptidase from Bacillus sinesaloumensis
MADQASQANGNQDVIEGELIVSVEPKNGKPDVSIQSAQSVTGQEDVLKSKGFTIVDTLHVEDSSVKPLVSKNFNKKVVEKMGLVYLVQYSPDQFKSSNIAKKELRKELMDLGFKVRYISENYKMMAIEGTATLQGVHPCQVWAYNMIKAPEAWAITGGSLSVKVAVLDTGIDHNHPSLANFVNTNLGRSFVGGNTMDVQGHGTHVAGTIASYGSVSGVMQQATLIPVKVLDNSGSGSLYGITQGILYAADIDADVINMSLGGGGYNQGMDEATQTAVAQGTIVVAATGNDGASSISYPAAYSSVIAVGSVDQNRVRSSFSNYGSGLELMAPGSNIYSTYPNGRYRTLSGTSMATPHVAGVAGLIRAANPDIVVAQARQILRDTAQEAGSFTQYGYGIVDAHAAVVAASGGSGG

SEQ ID NO: 1525 - DNA, 1239 bp, synthetic construct
  misc_feature 1..1239: note = Variant of serine peptidase from Bacillus sinesaloumensis
  source 1..1239: mol_type = other DNA
atggcagatcaagctagtcaagctaatggaaaccaggacgtcattgaaggcgagctgatcgtttcagtggaaccgaagaacggtaaacctgatgtgagcattcaaagtgcacaatccgtaacagggcaggaagacgtccttaaatcgaaaggctttacgatcgttgataccttgcatgtagaggatagcagcgtcaagccactcgtctcgaagaatttcaataagaaagtggtggagaagatgggactggtgtatcttgttcaatactctccggaccagtttaaaagttccaacattgcgaagaaagaactcagaaaagaattgatggatctgggctttaaagtccgctatataagcgaaaattacaagatgatggcgatcgaaggtacagccactcttcagggggtgcatcctctgcaagtttgggcgtataatatgattaaagctccggaagcgtgggctattacgggcggatccctgagcgttaaagtagcagtcctggatacagggatcgaccataatcacccatccttggccaacttcgtgaatactaatcttggccgctcgtttgttggaggaaacaccatggatgttcaaggtcatggcacacatgttgctggcacgattgcatcttatggggtcgtaagcggagtgatgcagagtgcgacactgatcccggtcaaagtgctcgataattctggcagcgggtccctttacggtattacgcagggcatattgtatgccgccgacatcgatgcagacgtcattaacatgtctctgggtggaggaggctataatcagggcatggatgaggctactcaaacagcagttgctcagggaaccattgtagtagcagcgactggcaatgatggtgcatcgtcgatcagttatcctgctgcctacagcagcgtcattgcggtgggatctgtggaccaaaatcgtgttcgatcctcgttttctaactatggatctgggcttgaactgatggcaccgggcagcaacatctacagtacgtatcctaatggcagatatcgcacgttgagtggtacaagcatggctactccgcacgttgcgggcgtagctgggctcattcgcgcagccaacccagacatagtggtcgcgcaagcccgtcagattctgcgggataccgcgcaagaagcaggatcgttcacacagtacggctatggaatcgtcgatgctcatgccgccgttgttgctgcatccggtggttcgggcggc

SEQ ID NO: 1526 - protein, 413 aa, synthetic construct
  REGION 1..413: note = Variant of serine peptidase from Bacillus sinesaloumensis
MADQASQANGNQDVIEGELIVSVEPKNGKPDVSIQSAQSVTGQEDVLKSKGFTIVDTLHVEDSSVKPLVSKNFNKKVVEKMGLVYLVQYSPDQFKSSNIAKKELRKELMDLGFKVRYISENYKMMAIEGTATLQGVHPLQVWAYNMIKAPEAWAITGGSLSVKVAVLDTGIDHNHPSLANFVNTNLGRSFVGGNTMDVQGHGTHVAGTIASYGVVSGVMQSATLIPVKVLDNSGSGSLYGITQGILYAADIDADVINMSLGGGGYNQGMDEATQTAVAQGTIVVAATGNDGASSISYPAAYSSVIAVGSVDQNRVRSSFSNYGSGLELMAPGSNIYSTYPNGRYRTLSGTSMATPHVAGVAGLIRAANPDIVVAQARQILRDTAQEAGSFTQYGYGIVDAHAAVVAASGGSGG

SEQ ID NO: 1527 - DNA, 1239 bp, synthetic construct
  misc_feature 1..1239: note = Variant of serine peptidase from Bacillus sinesaloumensis
  source 1..1239: mol_type = other DNA
atggcagatcaagctagtcaagctaatggaaaccaggacgtcattgaaggcgagctgatcgtttcagtggaaccgaagaacggtaaacctgatgtgagcattcaaagtgcacaatccgtaacagggcaggaagacgtccttaaatcgaaaggctttacgatcgttgataccttgcatgtagaggatagcagcgtcaagccactcgtctcgaagaatttcaataagaaagtggtggagaagatgggactggtgtatcttgttcaatactctccggaccagtttaaaagttccaacattgcgaagaaagaactcagaaaagaattgatggatctgggctttaaagtccgctatataagcgaaaattacaagatgatggcgatcgaaggtacagccactcttcagggggtgaatcctaatcaagtttgggcgtataatatgattaaagctccggaagcgtgggctattgttggcggatccctgagcgttaaagtagcagtcctggatacagggatcgaccataatcacccatccttggccaacttcgtgaatactaatcttggccgctcgtttgttggaggaaacaccatggatgttcaaggtcatggcacacatgttgctggcacgattgcatcttatgggagtgtaagcggagtgatgcagagtgcgacactgatcccggtcaaagtgctcgataattctggcagcgggtccctttacggtattacgcagggcatattgtatgccgccgacatcgatgcagacgtcattaacatgtctctgggtggaggaggctataatcagggcatggatgaggctactcaaacagcagttgctcagggaaccattgtagtagcagcgactggcaatgatggtgcatcgtcgatcagttatcctgctgcctacagcagcgtcattgcggtgggatctgtggaccaaaatcgtgttcgatcctcgttttctaactatggatctgggcttgaactgatggcaccgggcagcaacatctacagtacgtatcctaatggcagatatcgcacgttgagtggtacaagcatggctactccgcacgttgcgggcgtagctgggctcattcgcgcagccaacccagacatagtggtcgcgcaagcccgtcagattctgcgggataccgcgcaagaagcaggatcgttcacacagtacggctatggaatcgtcgatgctcatgccgccgttgttgctgcatccggtggttcgggcggc

SEQ ID NO: 1528 - protein, 413 aa, synthetic construct
  REGION 1..413: note = Variant of serine peptidase from Bacillus sinesaloumensis
MADQASQANGNQDVIEGELIVSVEPKNGKPDVSIQSAQSVTGQEDVLKSKGFTIVDTLHVEDSSVKPLVSKNFNKKVVEKMGLVYLVQYSPDQFKSSNIAKKELRKELMDLGFKVRYISENYKMMAIEGTATLQGVNPNQVWAYNMIKAPEAWAIVGGSLSVKVAVLDTGIDHNHPSLANFVNTNLGRSFVGGNTMDVQGHGTHVAGTIASYGSVSGVMQSATLIPVKVLDNSGSGSLYGITQGILYAADIDADVINMSLGGGGYNQGMDEATQTAVAQGTIVVAATGNDGASSISYPAAYSSVIAVGSVDQNRVRSSFSNYGSGLELMAPGSNIYSTYPNGRYRTLSGTSMATPHVAGVAGLIRAANPDIVVAQARQILRDTAQEAGSFTQYGYGIVDAHAAVVAASGGSGG

SEQ ID NO: 1529 - DNA, 1239 bp, synthetic construct
  misc_feature 1..1239: note = Variant of serine peptidase from Bacillus sinesaloumensis
  source 1..1239: mol_type = other DNA
atggcagatcaagctagtcaagctaatggaaaccaggacgtcattgaaggcgagctgatcgtttcagtggaaccgaagaacggtaaacctgatgtgagcattcaaagtgcacaatccgtaacagggcaggaagacgtccttaaatcgaaaggctttacgatcgttgataccttgcatgtagaggatagcagcgtcaagccactcgtctcgaagaatttcaataagaaagtggtggagaagatgggactggtgtatcttgttcaatactctccggaccagtttaaaagttccaacattgcgaagaaagaactcagaaaagaattgatggatctgggctttaaagtccgctatataagcgaaaattacaagatgatggcgatcgaaggtacagccactcttcagggggtgcatcctctgcaagtttgggcgtataatatgattaaagctccggaagcgtgggctattacgggcggatccctgagcgttaaagtagcagtcctggatacagggatcgaccataatcacccatccttggccaacttcgtgaatactaatcttggccgctcgtttgttggaggaaacaccatggatgttcaaggtcatggcacacatgttgctggcacgattgcatcttatggggtcgtaagcggagtgatgcagcaggcgacactgatcccggtcaaagtgctcgataattctggcagcgggtccctttacggtattacgcagggcatattgtatgccgccgacatcgatgcagacgtcattaacatgtctctgggtggaggaggctataatcagggcatggatgaggctactcaaacagcagttgctcaaggaaccattgtagtagcagcgactggcaatgatggtgcatcgtcgatcagttatcctgctgcctacagcagcgtcattgcggtgggatctgtggaccagaatcgtgttcgatcctcgttttctaactatggatctgggcttgaactgatggcaccgggcagcaacatctacagtacgtatcctaatggcagatatcgcacgttgagtggtacaagcatggctactccgcacgttgcgggcgtagctgggctcattcgcgcagccaacccagacatagtggtcgcgcaagcccgtcagattctgcgggataccgcgcaagaagcaggatcgttcacacagtacggctatggaatcgtcgatgctcatgccgccgttgttgctgcatccggtggttcgggcggc

SEQ ID NO: 1530 - protein, 413 aa, synthetic construct
  REGION 1..413: note = Variant of serine peptidase from Bacillus sinesaloumensis
MADQASQANGNQDVIEGELIVSVEPKNGKPDVSIQSAQSVTGQEDVLKSKGFTIVDTLHVEDSSVKPLVSKNFNKKVVEKMGLVYLVQYSPDQFKSSNIAKKELRKELMDLGFKVRYISENYKMMAIEGTATLQGVHPLQVWAYNMIKAPEAWAITGGSLSVKVAVLDTGIDHNHPSLANFVNTNLGRSFVGGNTMDVQGHGTHVAGTIASYGVVSGVMQQATLIPVKVLDNSGSGSLYGITQGILYAADIDADVINMSLGGGGYNQGMDEATQTAVAQGTIVVAATGNDGASSISYPAAYSSVIAVGSVDQNRVRSSFSNYGSGLELMAPGSNIYSTYPNGRYRTLSGTSMATPHVAGVAGLIRAANPDIVVAQARQILRDTAQEAGSFTQYGYGIVDAHAAVVAASGGSGG

SEQ ID NO: 1531 - DNA, 1239 bp, synthetic construct
  misc_feature 1..1239: note = Variant of serine peptidase from Bacillus sinesaloumensis
  source 1..1239: mol_type = other DNA
atggcagatcaagctagtcaagctaatggaaaccaggacgtcattgaaggcgagctgatcgtttcagtggaaccgaagaacggtaaacctgatgtgagcattcaaagtgcacaatccgtaacagggcaggaagacgtccttaaatcgaaaggctttacgatcgttgataccttgcatgtagaggatagcagcgtcaagccactcgtctcgaagaatttcaataagaaagtggtggagaagatgggactggtgtatcttgttcaatactctccggaccagtttaaaagttccaacattgcgaagaaagaactcagaaaagaattgatggatctgggctttaaagtccgctatataagcgaaaattacaagatgatggcgatcgaaggtacagccactcttcagggggtgcatccttgtcaagtttgggcgtataatatgattaaagctccggaagcgtgggctattacgggcggatccctgagcgttaaagtagcagtcctggatacagggatcgaccataatcacccatccttggccaacttcgtgaatactaatcttggccgctcgtttgttggaggaaacaccatggatgttcaaggtcatggcacacatgttgctggcacgattgcatcttatggggtcgtaagcggagtgatgcagagtgcgacactgatcccggtcaaagtgctcgataatctgggcagcgggtccctttacggtattacgcagggcatattgtatgccgccgacatcgatgcagacgtcattaacatgtctctgggtggaggaggctataatcagggcatggatgaggctactcaaacagcagttgctcagggaaccattgtagtagcagcgactggcaatgatggtgcatcgtcgatcagttatcctgctgcctacagcagcgtcattgcggtgggatctgtggaccaaaatcgtgttcgatcctcgttttctaactatggatctgggcttgaactgatggcaccgggcagcaacatctacagtacgtatcctaatggcagatatcgcacgttgagtggtacaagcatggctactccgcacgttgcgggcgtagctgggctcattcgcgcagccaacccagacatagtggtcgcgcaagcccgtcagattctgcgggataccgcgcaagaagcaggatcgttcacacagtacggctatggaatcgtcgatgctcatgccgccgttgttgctgcatccggtggttcgggcggc

SEQ ID NO: 1532 - protein, 413 aa, synthetic construct
  REGION 1..413: note = Variant of serine peptidase from Bacillus sinesaloumensis
MADQASQANGNQDVIEGELIVSVEPKNGKPDVSIQSAQSVTGQEDVLKSKGFTIVDTLHVEDSSVKPLVSKNFNKKVVEKMGLVYLVQYSPDQFKSSNIAKKELRKELMDLGFKVRYISENYKMMAIEGTATLQGVHPCQVWAYNMIKAPEAWAITGGSLSVKVAVLDTGIDHNHPSLANFVNTNLGRSFVGGNTMDVQGHGTHVAGTIASYGVVSGVMQSATLIPVKVLDNLGSGSLYGITQGILYAADIDADVINMSLGGGGYNQGMDEATQTAVAQGTIVVAATGNDGASSISYPAAYSSVIAVGSVDQNRVRSSFSNYGSGLELMAPGSNIYSTYPNGRYRTLSGTSMATPHVAGVAGLIRAANPDIVVAQARQILRDTAQEAGSFTQYGYGIVDAHAAVVAASGGSGG

SEQ ID NO: 1533 - DNA, 1239 bp, synthetic construct
  misc_feature 1..1239: note = Variant of serine peptidase from Bacillus sinesaloumensis
  source 1..1239: mol_type = other DNA
atggcagatcaagctagtcaagctaatggaaaccaggacgtcattgaaggcgagctgatcgtttcagtggaaccgaagaacggtaaacctgatgtgagcattcaaagtgcacaatccgtaacagggcaggaagacgtccttaaatcgaaaggctttacgatcgttgataccttgcatgtagaggatagcagcgtcaagccactcgtctcgaagaatttcaataagaaagtggtggagaagatgggactggtgtatcttgttcaatactctccggaccagtttaaaagttccaacattgcgaagaaagaactcagaaaagaattgatggatctgggctttaaagtccgctatataagcgaaaattacaagatgatggcgatcgaaggtacagccactcttcagggggtggctcctctgcaagtttgggcgtataatatgattaaagctccggaagcgtgggctattacgggcggatccctgagcgttaaagtagcagtcctggatacagggatcgaccataatcacccatccttggccaacttcgtgaatactaatcttggccgctcgtttgttggaggaaacaccatggatgttcaaggtcatggcacacatgttgctggcacgattgcatcttatgggagtgtaagcggagtgatgcagcaggcgacactgatcccggtcaaagtgctcgataatctgggcagcgggtccctttacggtattacgcagggcatattgtatgccgccgacatcgatgcagacgtcattaacatgtctctgggtggaggaggctataatcagggcatggatgaggctactcaaacagcagttgctaagggaaccattgtagtagcagcgactggcaatgatggtgcatcgtcgatcagttatcctgctgcctacagcagcgtcattgcggtgggatctgtggaccagaatcgtgttcgatcctcgttttctaactatggatctgggcttgaactgatggcaccgggcagcaacatctacagtacgtatcctaatggcagatatcgcacgttgagtggtacaagcatggctactccgcacgttgcgggcgtagctgggctcattcgcgcagccaacccagacatagtggtcgcgcaagcccgtcagattctgcgggataccgcgcaagaagcaggatcgttcacacagtacggctatggaatcgtcgatgctcatgccgccgttgttgctgcatccggtggttcgggcggc

SEQ ID NO: 1534 - protein, 413 aa, synthetic construct
  REGION 1..413: note = Variant of serine peptidase from Bacillus sinesaloumensis
MADQASQANGNQDVIEGELIVSVEPKNGKPDVSIQSAQSVTGQEDVLKSKGFTIVDTLHVEDSSVKPLVSKNFNKKVVEKMGLVYLVQYSPDQFKSSNIAKKELRKELMDLGFKVRYISENYKMMAIEGTATLQGVAPLQVWAYNMIKAPEAWAITGGSLSVKVAVLDTGIDHNHPSLANFVNTNLGRSFVGGNTMDVQGHGTHVAGTIASYGSVSGVMQQATLIPVKVLDNLGSGSLYGITQGILYAADIDADVINMSLGGGGYNQGMDEATQTAVAKGTIVVAATGNDGASSISYPAAYSSVIAVGSVDQNRVRSSFSNYGSGLELMAPGSNIYSTYPNGRYRTLSGTSMATPHVAGVAGLIRAANPDIVVAQARQILRDTAQEAGSFTQYGYGIVDAHAAVVAASGGSGG

SEQ ID NO: 1535 - DNA, 1239 bp, synthetic construct
  misc_feature 1..1239: note = Variant of serine peptidase from Bacillus sinesaloumensis
  source 1..1239: mol_type = other DNA
atggcagatcaagctagtcaagctaatggaaaccaggacgtcattgaaggcgagctgatcgtttcagtggaaccgaagaacggtaaacctgatgtgagcattcaaagtgcacaatccgtaacagggcaggaagacgtccttaaatcgaaaggctttacgatcgttgataccttgcatgtagaggatagcagcgtcaagccactcgtctcgaagaatttcaataagaaagtggtggagaagatgggactggtgtatcttgttcaatactctccggaccagtttaaaagttccaacattgcgaagaaagaactcagaaaagaattgatggatctgggctttaaagtccgctatataagcgaaaattacaagatgatggcgatcgaaggtacagccactcttcagggggtggctcctctgcaagtttgggcgtataatatgattaaagctccggaagcgtgggctattacgggcggatccctgagcgttaaagtagcagtcctggatacagggatcgaccataatcacccatccttggccaacttcgtgaatactaatcttggccgctcgtttgttggaggaaacaccatggatgttcaaggtcatggcacacatgttgctggcacgattgcatcttatgggagtgtaagcggagtgatgcagcaggcgacactgatcccggtcaaagtgctcgataattctggcagcgggtccctttacggtattacgcagggcatattgtatgccgccgacatcgatgcagacgtcattaacatgtctctgggtggaggaggctataatcagggcatggatgaggctactcaaacagcagttgctcagggaaccattgtagtagcagcgactggcaatgatggtgcatcgtcgatcagttatcctgctgcctacagcagcgtcattgcggtgggatctgtggaccaaaatcgtgttcgatcctcgttttctaactatggatctgggcttgaactgatggcaccgggcagcaacatctacagtacgtatcctaatggcagatatcgcacgttgagtggtacaagcatggctactccgcacgttgcgggcgtagctgggctcattcgcgcagccaacccagacatagtggtcgcgcaagcccgtcagattctgcgggataccgcgcaagaagcaggatcgttcacacagtacggctatggaatcgtcgatgctcatgccgccgttgttgctgcatccggtggttcgggcggc

SEQ ID NO: 1536 - protein, 413 aa, synthetic construct
  REGION 1..413: note = Variant of serine peptidase from Bacillus sinesaloumensis
MADQASQANGNQDVIEGELIVSVEPKNGKPDVSIQSAQSVTGQEDVLKSKGFTIVDTLHVEDSSVKPLVSKNFNKKVVEKMGLVYLVQYSPDQFKSSNIAKKELRKELMDLGFKVRYISENYKMMAIEGTATLQGVAPLQVWAYNMIKAPEAWAITGGSLSVKVAVLDTGIDHNHPSLANFVNTNLGRSFVGGNTMDVQGHGTHVAGTIASYGSVSGVMQQATLIPVKVLDNSGSGSLYGITQGILYAADIDADVINMSLGGGGYNQGMDEATQTAVAQGTIVVAATGNDGASSISYPAAYSSVIAVGSVDQNRVRSSFSNYGSGLELMAPGSNIYSTYPNGRYRTLSGTSMATPHVAGVAGLIRAANPDIVVAQARQILRDTAQEAGSFTQYGYGIVDAHAAVVAASGGSGG

SEQ ID NO: 1537 - DNA, 1239 bp, synthetic construct
  misc_feature 1..1239: note = Variant of serine peptidase from Bacillus sinesaloumensis
  source 1..1239: mol_type = other DNA
atggcagatcaagctagtcaagctaatggaaaccaggacgtcattgaaggcgagctgatcgtttcagtggaaccgaagaacggtaaacctgatgtgagcattcaaagtgcacaatccgtaacagggcaggaagacgtccttaaatcgaaaggctttacgatcgttgataccttgcatgtagaggatagcagcgtcaagccactcgtctcgaagaatttcaataagaaagtggtggagaagatgggactggtgtatcttgttcaatactctccggaccagtttaaaagttccaacattgcgaagaaagaactcagaaaagaattgatggatctgggctttaaagtccgctatataagcgaaaattacaagatgatggcgatcgaaggtacagccactcttcagggggtgaatcctctgcaagtttgggcgtataatatgattaaagctccggaagcgtgggctattacgggcggatccctgagcgttaaagtagcagtcctggatacagggatcgaccataatcacccatccttggccaacttcgtgaatactaatcttggccgctcgtttgttggaggaaacaccatggatgttcaaggtcatggcacacatgttgctggcacgattgcatcttatgggtcggtaagcggagtgatgcagagtgcgacactgatcccggtcaaagtgctcgataattctggcagcgggtccctttacggtattacgcagggcatattgtatgccgccgacatcgatgcagacgtcattaacatgtctctgggtggagggggctataatcagggcatggatgaggctactcaaacagcagttgctcagggaaccattgtagtagcagcgactggcaatgatggtgcatcgtcgatcagttatcctgctgcctacagcagcgtcattgcggtgggatctgtggaccagaatcgtgttcgatcctcgttttctaactatggatctgggcttgaactgatggcaccgggcagcaacatctacagtacgtatcctaatggcagatatcgcacgttgagtggtacaagcatggctactccgcacgttgcgggcgtagctgggctcattcgcgcagccaacccagacatagtggtcgcgcaagcccgtcagattctgcgggataccgcgcaagaagcaggatcgttcacacagtacggctatggaatcgtcgatgctcatgccgccgttgttgctgcatccggtggttcgggcggc

SEQ ID NO: 1538 - protein, 413 aa, synthetic construct
  REGION 1..413: note = Variant of serine peptidase from Bacillus sinesaloumensis
MADQASQANGNQDVIEGELIVSVEPKNGKPDVSIQSAQSVTGQEDVLKSKGFTIVDTLHVEDSSVKPLVSKNFNKKVVEKMGLVYLVQYSPDQFKSSNIAKKELRKELMDLGFKVRYISENYKMMAIEGTATLQGVNPLQVWAYNMIKAPEAWAITGGSLSVKVAVLDTGIDHNHPSLANFVNTNLGRSFVGGNTMDVQGHGTHVAGTIASYGSVSGVMQSATLIPVKVLDNSGSGSLYGITQGILYAADIDADVINMSLGGGGYNQGMDEATQTAVAQGTIVVAATGNDGASSISYPAAYSSVIAVGSVDQNRVRSSFSNYGSGLELMAPGSNIYSTYPNGRYRTLSGTSMATPHVAGVAGLIRAANPDIVVAQARQILRDTAQEAGSFTQYGYGIVDAHAAVVAASGGSGG

SEQ ID NO: 1539 - DNA, 1239 bp, synthetic construct
  misc_feature 1..1239: note = Variant of serine peptidase from Bacillus sinesaloumensis
  source 1..1239: mol_type = other DNA
atggcagatcaagctagtcaagctaatggaaaccaggacgtcattgaaggcgagctgatcgtttcagtggaaccgaagaacggtaaacctgatgtgagcattcaaagtgcacaatccgtaacagggcaggaagacgtccttaaatcgaaaggctttacgatcgttgataccttgcatgtagaggatagcagcgtcaagccactcgtctcgaagaatttcaataagaaagtggtggagaagatgggactggtgtatcttgttcaatactctccggaccagtttaaaagttccaacattgcgaagaaagaactcagaaaagaattgatggatctgggctttaaagtccgctatataagcgaaaattacaagatgatggcgatcgaaggtacagccactcttcagggggtgaatcctctgcaagtttgggcgtataatatgattaaagctccggaagcgtgggctattacgggcggatccctgagcgttaaagtagcagtcctggatacagggatcgaccataatcacccatccttggccaacttcgtgaatactaatcttggccgctcgtttgttggaggaaacaccatggatgttcaaggtcatggcacacatgttgctggcacgattgcatcttatgggtcggtaagcggagtgatgcagagtgcgacactgatcccggtcaaagtgctcgataattctggcagcgggtccctttacggtattacgcagggcatattgtatgccgccgacatcgatgcagacgtcattaacatgtctctgggtggaggaggctataatcagggcatggatgaggctactcaaacagcagttgctaagggaaccattgtagtagcagcgactggcaatgatggtgcatcgtcgatcagttatcctgctgcctacagcagcgtcattgcggtgggatctgtggaccaaaatcgtgttcgatcctcgttttctaactatggatctgggcttgaactgatggcaccgggcagcaacatctacagtacgtatcctaatggcagatatcgcacgttgagtggtacaagcatggctactccgcacgttgcgggcgtagctgggctcattcgcgcagccaacccagacatagtggtcgcgcaagcccgtcagattctgcgggataccgcgcaagaagcaggatcgttcacacagtacggctatggaatcgtcgatgctcatgccgccgttgttgctgcatccggtggttcgggcggc

SEQ ID NO: 1540 - protein, 413 aa, synthetic construct
  REGION 1..413: note = Variant of serine peptidase from Bacillus sinesaloumensis
MADQASQANGNQDVIEGELIVSVEPKNGKPDVSIQSAQSVTGQEDVLKSKGFTIVDTLHVEDSSVKPLVSKNFNKKVVEKMGLVYLVQYSPDQFKSSNIAKKELRKELMDLGFKVRYISENYKMMAIEGTATLQGVNPLQVWAYNMIKAPEAWAITGGSLSVKVAVLDTGIDHNHPSLANFVNTNLGRSFVGGNTMDVQGHGTHVAGTIASYGSVSGVMQSATLIPVKVLDNSGSGSLYGITQGILYAADIDADVINMSLGGGGYNQGMDEATQTAVAKGTIVVAATGNDGASSISYPAAYSSVIAVGSVDQNRVRSSFSNYGSGLELMAPGSNIYSTYPNGRYRTLSGTSMATPHVAGVAGLIRAANPDIVVAQARQILRDTAQEAGSFTQYGYGIVDAHAAVVAASGGSGG

SEQ ID NO: 1541 - DNA, 1239 bp, synthetic construct
  misc_feature 1..1239: note = Variant of serine peptidase from Bacillus sinesaloumensis
  source 1..1239: mol_type = other DNA
atggcagatcaagctagtcaagctaatggaaaccaggacgtcattgaaggcgagctgatcgtttcagtggaaccgaagaacggtaaacctgatgtgagcattcaaagtgcacaatccgtaacagggcaggaagacgtccttaaatcgaaaggctttacgatcgttgataccttgcatgtagaggatagcagcgtcaagccactcgtctcgaagaatttcaataagaaagtggtggagaagatgggactggtgtatcttgttcaatactctccggaccagtttaaaagttccaacattgcgaagaaagaactcagaaaagaattgatggatctgggctttaaagtccgctatataagcgaaaattacaagatgatggcgatcgaaggtacagccactcttcagggggtggctcctaatcaagtttgggcgtataatatgattaaagctccggaagcgtgggctattacgggcggatccctgagcgttaaagtagcagtcctggatacagggatcgaccataatcacccatccttggccaacttcgtgaatactaatcttggccgctcgtttgttggaggaaacaccatggatgttcaaggtcatggcacacatgttgctggcacgattgcatcttatgggagtgtaagcggagtgatgcagagtgcgacactgatcccggtcaaagtgctcgataattctggcagcgggtccctttacggtattacgcagggcatattgtatgccgccgacatcgatgcagacgtcattaacatgtctctgggtggaggaggctataatcagggcatggatgaggctactcaaacagcagttgctcagggaaccattgtagtagcagcgactggcaatgatggtgcatcgtcgatcagttatcctgctgcctacagcagcgtcattgcggtgggatctgtggaccaaaatcgtgttcgatcctcgttttctaactatggatctgggcttgaactgatggcaccgggcagcaacatctacagtacgtatcctaatggcagatatcgcacgttgagtggtacaagcatggctactccgcacgttgcgggcgtagctgggctcattcgcgcagccaacccagacatagtggtcgcgcaagcccgtcagattctgcgggataccgcgcaagaagcaggatcgttcacacagtacggctatggaatcgtcgatgctcatgccgccgttgttgctgcatccggtggttcgggcggc

SEQ ID NO: 1542 - protein, 413 aa, synthetic construct
  REGION 1..413: note = Variant of serine peptidase from Bacillus sinesaloumensis
MADQASQANGNQDVIEGELIVSVEPKNGKPDVSIQSAQSVTGQEDVLKSKGFTIVDTLHVEDSSVKPLVSKNFNKKVVEKMGLVYLVQYSPDQFKSSNIAKKELRKELMDLGFKVRYISENYKMMAIEGTATLQGVAPNQVWAYNMIKAPEAWAITGGSLSVKVAVLDTGIDHNHPSLANFVNTNLGRSFVGGNTMDVQGHGTHVAGTIASYGSVSGVMQSATLIPVKVLDNSGSGSLYGITQGILYAADIDADVINMSLGGGGYNQGMDEATQTAVAQGTIVVAATGNDGASSISYPAAYSSVIAVGSVDQNRVRSSFSNYGSGLELMAPGSNIYSTYPNGRYRTLSGTSMATPHVAGVAGLIRAANPDIVVAQARQILRDTAQEAGSFTQYGYGIVDAHAAVVAASGGSGG

SEQ ID NO: 1543 - DNA, 1239 bp, synthetic construct
  misc_feature 1..1239: note = Variant of serine peptidase from Bacillus sinesaloumensis
  source 1..1239: mol_type = other DNA
atggcagatcaagctagtcaagctaatggaaaccaggacgtcattgaaggcgagctgatcgtttcagtggaaccgaagaacggtaaacctgatgtgagcattcaaagtgcacaatccgtaacagggcaggaagacgtccttaaatcgaaaggctttacgatcgttgataccttgcatgtagaggatagcagcgtcaagccactcgtctcgaagaatttcaataagaaagtggtggagaagatgggactggtgtatcttgttcaatactctccggaccagtttaaaagttccaacattgcgaagaaagaactcagaaaagaattgatggatctgggctttaaagtccgctatataagcgaaaattacaagatgatggcgatcgaaggtacagccactcttcagggggtgaatccttgtcaagtttgggcgtataatatgattaaagctccggaagcgtgggctattacgggcggatccctgagcgttaaagtagcagtcctggatacagggatcgaccataatcacccatccttggccaacttcgtgaatactaatcttggccgctcgtttgttggaggaaacaccatggatgttcaaggtcatggcacacatgttgctggcacgattgcatcttatgggagtgtaagcggagtgatgcagagtgcgacactgatcccggtcaaagtgctcgataattctggcagcgggtccctttacggtattacgcagggcatattgtatgccgccgacatcgatgcagacgtcattaacatgtctctgggtggaggaggctataatcagggcatggatgaggctactcaaacagcagttgctcaaggaaccattgtagtagcagcgactggcaatgatggtgcatcgtcgatcagttatcctgctgcctacagcagcgtcattgcggtgggatctgtggaccaaaatcgtgttcgatcctcgttttctaactatggatctgggcttgaactgatggcaccgggcagcaacatctacagtacgtatcctaatggcagatatcgcacgttgagtggtacaagcatggctactccgcacgttgcgggcgtagctgggctcattcgcgcagccaacccagacatagtggtcgcgcaagcccgtcagattctgcgggataccgcgcaagaagcaggatcgttcacacagtacggctatggaatcgtcgatgctcatgccgccgttgttgctgcatccggtggttcgggcggc

SEQ ID NO: 1544 - protein, 413 aa, synthetic construct
  REGION 1..413: note = Variant of serine peptidase from Bacillus sinesaloumensis
MADQASQANGNQDVIEGELIVSVEPKNGKPDVSIQSAQSVTGQEDVLKSKGFTIVDTLHVEDSSVKPLVSKNFNKKVVEKMGLVYLVQYSPDQFKSSNIAKKELRKELMDLGFKVRYISENYKMMAIEGTATLQGVNPCQVWAYNMIKAPEAWAITGGSLSVKVAVLDTGIDHNHPSLANFVNTNLGRSFVGGNTMDVQGHGTHVAGTIASYGSVSGVMQSATLIPVKVLDNSGSGSLYGITQGILYAADIDADVINMSLGGGGYNQGMDEATQTAVAQGTIVVAATGNDGASSISYPAAYSSVIAVGSVDQNRVRSSFSNYGSGLELMAPGSNIYSTYPNGRYRTLSGTSMATPHVAGVAGLIRAANPDIVVAQARQILRDTAQEAGSFTQYGYGIVDAHAAVVAASGGSGG

SEQ ID NO: 1545 - DNA, 1239 bp, synthetic construct
  misc_feature 1..1239: note = Variant of serine peptidase from Bacillus sinesaloumensis
  source 1..1239: mol_type = other DNA
atggcagatcaagctagtcaagctaatggaaaccaggacgtcattgaaggcgagctgatcgtttcagtggaaccgaagaacggtaaacctgatgtgagcattcaaagtgcacaatccgtaacagggcaggaagacgtccttaaatcgaaaggctttacgatcgttgataccttgcatgtagaggatagcagcgtcaagccactcgtctcgaagaatttcaataagaaagtggtggagaagatgggactggtgtatcttgttcaatactctccggaccagtttaaaagttccaacattgcgaagaaagaactcagaaaagaattgatggatctgggctttaaagtccgctatataagcgaaaattacaagatgatggcgatcgaaggtacagccactcttcagggggtgaatcctctgcaagtttgggcgtataatatgattaaagctccggaagcgtgggctattacgggcggatccctgagcgttaaagtagcagtcctggatacagggatcgaccataatcacccatccttggccaacttcgtgaatactaatcttggccgctcgtttgttggaggaaacaccatggatgttcaaggtcatggcacacatgttgctggcacgattgcatcttatgggagtgtaagcggagtgatgcagcaggcgacactgatcccggtcaaagtgctcgataattctggcagcgggtccctttacggtattacgcagggcatattgtatgccgccgacatcgatgcagacgtcattaacatgtctctgggtggagggggctataatcagggcatggatgaggctactcaaacagcagttgctcagggaaccattgtagtagcagcgactggcaatgatggtgcatcgtcgatcagttatcctgctgcctacagcagcgtcattgcggtgggatctgtggaccaaaatcgtgttcgatcctcgttttctaactatggatctgggcttgaactgatggcaccgggcagcaacatctacagtacgtatcctaatggcagatatcgcacgttgagtggtacaagcatggctactccgcacgttgcgggcgtagctgggctcattcgcgcagccaacccagacatagtggtcgcgcaagcccgtcagattctgcgggataccgcgcaagaagcaggatcgttcacacagtacggctatggaatcgtcgatgctcatgccgccgttgttgctgcatccggtggttcgggcggc

SEQ ID NO: 1546 - protein, 413 aa, synthetic construct
  REGION 1..413: note = Variant of serine peptidase from Bacillus sinesaloumensis
MADQASQANGNQDVIEGELIVSVEPKNGKPDVSIQSAQSVTGQEDVLKSKGFTIVDTLHVEDSSVKPLVSKNFNKKVVEKMGLVYLVQYSPDQFKSSNIAKKELRKELMDLGFKVRYISENYKMMAIEGTATLQGVNPLQVWAYNMIKAPEAWAITGGSLSVKVAVLDTGIDHNHPSLANFVNTNLGRSFVGGNTMDVQGHGTHVAGTIASYGSVSGVMQQATLIPVKVLDNSGSGSLYGITQGILYAADIDADVINMSLGGGGYNQGMDEATQTAVAQGTIVVAATGNDGASSISYPAAYSSVIAVGSVDQNRVRSSFSNYGSGLELMAPGSNIYSTYPNGRYRTLSGTSMATPHVAGVAGLIRAANPDIVVAQARQILRDTAQEAGSFTQYGYGIVDAHAAVVAASGGSGG

SEQ ID NO: 1547 - DNA, 1239 bp, synthetic construct
  misc_feature 1..1239: note = Variant of serine peptidase from Bacillus sinesaloumensis
  source 1..1239: mol_type = other DNA
atggcagatcaagctagtcaagctaatggaaaccaggacgtcattgaaggcgagctgatcgtttcagtggaaccgaagaacggtaaacctgatgtgagcattcaaagtgcacaatccgtaacagggcaggaagacgtccttaaatcgaaaggctttacgatcgttgataccttgcatgtagaggatagcagcgtcaagccactcgtctcgaagaatttcaataagaaagtggtggagaagatgggactggtgtatcttgttcaatactctccggaccagtttaaaagttccaacattgcgaagaaagaactcagaaaagaattgatggatctgggctttaaagtccgctatataagcgaaaattacaagatgatggcgatcgaaggtacagccactcttcagggggtgaatcctctgcaagtttgggcgtataatatgattaaagctccggaagcgtgggctattacgggcggatccctgagcgttaaagtagcagtcctggatacagggatcgaccataatcacccatccttggccaacttcgtgaatactaatcttggccgctcgtttgttggaggaaacaccatggatgttcaaggtcatggcacacatgttgctggcacgattgcatcttatgggccggtaagcggagtgatgcagagtgcgacactgatcccggtcaaagtgctcgataattctggcagcgggtccctttacggtattacgcagggcatattgtatgccgccgacatcgatgcagacgtcattaacatgtctctgggtggaggaggctataatcagggcatggatgaggctactcaaacagcagttgctatgggaaccattgtagtagcagcgactggcaatgatggtgcatcgtcgatcagttatcctgctgcctacagcagcgtcattgcggtgggatctgtggaccaaaatcgtgttcgatcctcgttttctaactatggatctgggcttgaactgatggcaccgggcagcaacatctacagtacgtatcctaatggcagatatcgcacgttgagtggtacaagcatggctactccgcacgttgcgggcgtagctgggctcattcgcgcagccaacccagacatagtggtcgcgcaagcccgtcagattctgcgggataccgcgcaagaagcaggatcgttcacacagtacggctatggaatcgtcgatgctcatgccgccgttgttgctgcatccggtggttcgggcggc

SEQ ID NO: 1548 - protein, 413 aa, synthetic construct
  REGION 1..413: note = Variant of serine peptidase from Bacillus sinesaloumensis
MADQASQANGNQDVIEGELIVSVEPKNGKPDVSIQSAQSVTGQEDVLKSKGFTIVDTLHVEDSSVKPLVSKNFNKKVVEKMGLVYLVQYSPDQFKSSNIAKKELRKELMDLGFKVRYISENYKMMAIEGTATLQGVNPLQVWAYNMIKAPEAWAITGGSLSVKVAVLDTGIDHNHPSLANFVNTNLGRSFVGGNTMDVQGHGTHVAGTIASYGPVSGVMQSATLIPVKVLDNSGSGSLYGITQGILYAADIDADVINMSLGGGGYNQGMDEATQTAVAMGTIVVAATGNDGASSISYPAAYSSVIAVGSVDQNRVRSSFSNYGSGLELMAPGSNIYSTYPNGRYRTLSGTSMATPHVAGVAGLIRAANPDIVVAQARQILRDTAQEAGSFTQYGYGIVDAHAAVVAASGGSGG

SEQ ID NO: 1549 - DNA, 1239 bp, synthetic construct
  misc_feature 1..1239: note = Variant of serine peptidase from Bacillus sinesaloumensis
  source 1..1239: mol_type = other DNA
atggcagatcaagctagtcaagctaatggaaaccaggacgtcattgaaggcgagctgatcgtttcagtggaaccgaagaacggtaaacctgatgtgagcattcaaagtgcacaatccgtaacagggcaggaagacgtccttaaatcgaaaggctttacgatcgttgataccttgcatgtagaggatagcagcgtcaagccactcgtctcgaagaatttcaataagaaagtggtggagaagatgggactggtgtatcttgttcaatactctccggaccagtttaaaagttccaacattgcgaagaaagaactcagaaaagaattgatggatctgggctttaaagtccgctatataagcgaaaattacaagatgatggcgatcgaaggtacagccactcttcagggggtgcatccttgtcaagtttgggcgtataatatgattaaagctccggaagcgtgggctattacgggcggatccctgagcgttaaagtagcagtcctggatacagggatcgaccataatcacccatccttggccaacttcgtgaatactaatcttggccgctcgtttgttggaggaaacaccatggatgttcaaggtcatggcacacatgttgctggcacgattgcatcttatgggagtgtaagcggagtgatgcagagtgcgacactgatcccggtcaaagtgctcgataattctggcagcgggtccctttacggtattacgcagggcatattgtatgccgccgacatcgatgcagacgtcattaacatgtctctgggtggaggaggctattatcagggcatggatgaggctactcaaacagcagttgctcagggaaccattgtagtagcagcgactggcaatgatggtgcatcgtcgatcagttatcctgctgcctacagcagcgtcattgcggtgggatctgtggaccaaaatcgtgttcgatcctcgttttctaactatggatctgggcttgaactgatggcaccgggcagcaacatctacagtacgtatcctaatggcagatatcgcacgttgagtggtacaagcatggctactccgcacgttgcgggcgtagctgggctcattcgcgcagccaacccagacatagtggtcgcgcaagcccgtcagattctgcgggataccgcgcaagaagcaggatcgttcacacagtacggctatggaatcgtcgatgctcatgccgccgttgttgctgcatccggtggttcgggcggc

SEQ ID NO: 1550 - protein, 413 aa, synthetic construct
  REGION 1..413: note = Variant of serine peptidase from Bacillus sinesaloumensis
MADQASQANGNQDVIEGELIVSVEPKNGKPDVSIQSAQSVTGQEDVLKSKGFTIVDTLHVEDSSVKPLVSKNFNKKVVEKMGLVYLVQYSPDQFKSSNIAKKELRKELMDLGFKVRYISENYKMMAIEGTATLQGVHPCQVWAYNMIKAPEAWAITGGSLSVKVAVLDTGIDHNHPSLANFVNTNLGRSFVGGNTMDVQGHGTHVAGTIASYGSVSGVMQSATLIPVKVLDNSGSGSLYGITQGILYAADIDADVINMSLGGGGYYQGMDEATQTAVAQGTIVVAATGNDGASSISYPAAYSSVIAVGSVDQNRVRSSFSNYGSGLELMAPGSNIYSTYPNGRYRTLSGTSMATPHVAGVAGLIRAANPDIVVAQARQILRDTAQEAGSFTQYGYGIVDAHAAVVAASGGSGG

SEQ ID NO: 1551 - DNA, 1239 bp, synthetic construct
  misc_feature 1..1239: note = Variant of serine peptidase from Bacillus sinesaloumensis
  source 1..1239: mol_type = other DNA
atggcagatcaagctagtcaagctaatggaaaccaggacgtcattgaaggcgagctgatcgtttcagtggaaccgaagaacggtaaacctgatgtgagcattcaaagtgcacaatccgtaacagggcaggaagacgtccttaaatcgaaaggctttacgatcgttgataccttgcatgtagaggatagcagcgtcaagccactcgtctcgaagaatttcaataagaaagtggtggagaagatgggactggtgtatcttgttcaatactctccggaccagtttaaaagttccaacattgcgaagaaagaactcagaaaagaattgatggatctgggctttaaagtccgctatataagcgaaaattacaagatgatggcgatcgaaggtacagccactcttcagggggtgcatcctctgcaagtttgggcgtataatatgattaaagctccggaagcgtgggctattacgggcggatccctgagcgttaaagtagcagtcctggatacagggatcgaccataatcacccatccttggccaacttcgtgaatactaatcttggccgctcgtttgttggaggaaacaccatggatgttcaaggtcatggcacacatgttgctggcacgattgcatcttatgggagtgtaagcggagtgatgcagcaggcgacactgatcccggtcaaagtgctcgataattctggcagcgggtccctttacggtattacgcagggcatattgtatgccgccgacatcgatgcagacgtcattaacatgtctctgggtggaggaggctataatcagggcatggatgaggctactcaaacagcagttgctcagggaaccattgtagtagcagcgactggcaatgatggtgcatcgtcgatcagttatcctgctgcctacagcagcgtcattgcggtgggatctgtggaccaaaatcgtgttcgatcctcgttttctaactatggatctgggcttgaactgatggcaccgggcagcaacatctacagtacgtatcctaatggcagatatcgcacgttgagtggtacaagcatggctactccgcacgttgcgggcgtagctgggctcattcgcgcagccaacccagacatagtggtcgcgcaagcccgtcagattctgcgggataccgcgcaagaagcaggatcgttcacacagtacggctatggaatcgtcgatgctcatgccgccgttgttgctgcatccggtggttcgggcggc

SEQ ID NO: 1552 - protein, 413 aa, synthetic construct
  REGION 1..413: note = Variant of serine peptidase from Bacillus sinesaloumensis
MADQASQANGNQDVIEGELIVSVEPKNGKPDVSIQSAQSVTGQEDVLKSKGFTIVDTLHVEDSSVKPLVSKNFNKKVVEKMGLVYLVQYSPDQFKSSNIAKKELRKELMDLGFKVRYISENYKMMAIEGTATLQGVHPLQVWAYNMIKAPEAWAITGGSLSVKVAVLDTGIDHNHPSLANFVNTNLGRSFVGGNTMDVQGHGTHVAGTIASYGSVSGVMQQATLIPVKVLDNSGSGSLYGITQGILYAADIDADVINMSLGGGGYNQGMDEATQTAVAQGTIVVAATGNDGASSISYPAAYSSVIAVGSVDQNRVRSSFSNYGSGLELMAPGSNIYSTYPNGRYRTLSGTSMATPHVAGVAGLIRAANPDIVVAQARQILRDTAQEAGSFTQYGYGIVDAHAAVVAASGGSGG

SEQ ID NO: 1553 - DNA, 1239 bp, synthetic construct
  misc_feature 1..1239: note = Variant of serine peptidase from Bacillus sinesaloumensis
  source 1..1239: mol_type = other DNA
atggcagatcaagctagtcaagctaatggaaaccaggacgtcattgaaggcgagctgatcgtttcagtggaaccgaagaacggtaaacctgatgtgagcattcaaagtgcacaatccgtaacagggcaggaagacgtccttaaatcgaaaggctttacgatcgttgataccttgcatgtagaggatagcagcgtcaagccactcgtctcgaagaatttcaataagaaagtggtggagaagatgggactggtgtatcttgttcaatactctccggaccagtttaaaagttccaacattgcgaagaaagaactcagaaaagaattgatggatctgggctttaaagtccgctatataagcgaaaattacaagatgatggcgatcgaaggtacagccactcttcagggggtgaatccttgtcaagtttgggcgtataatatgattaaagctccggaagcgtgggctattacgggcggatccctgagcgttaaagtagcagtcctggatacagggatcgaccataatcacccatccttggccaacttcgtgaatactaatcttggccgctcgtttgttggaggaaacaccatggatgttcaaggtcatggcacacatgttgctggcacgattgcatcttatgggagtgtaagcggagtgatgcagcaggcgacactgatcccggtcaaagtgctcgataattctggcagcgggtccctttacggtattacgcagggcatattgtatgccgccgacatcgatgcagacgtcattaacatgtctctgggtggagggggctataatcagggcatggatgaggctactcaaacagcagttgctcagggaaccattgtagtagcagcgactggcaatgatggtgcatcgtcgatcagttatcctgctgcctacagcagcgtcattgcggtgggatctgtggaccaaaatcgtgttcgatcctcgttttctaactatggatctgggcttgaactgatggcaccgggcagcaacatctacagtacgtatcctaatggcagatatcgcacgttgagtggtacaagcatggctactccgcacgttgcgggcgtagctgggctcattcgcgcagccaacccagacatagtggtcgcgcaagcccgtcagattctgcgggataccgcgcaagaagcaggatcgttcacacagtacggctatggaatcgtcgatgctcatgccgccgttgttgctgcatccggtggttcgggcggc

SEQ ID NO: 1554 - protein, 413 aa, synthetic construct
  REGION 1..413: note = Variant of serine peptidase from Bacillus sinesaloumensis
MADQASQANGNQDVIEGELIVSVEPKNGKPDVSIQSAQSVTGQEDVLKSKGFTIVDTLHVEDSSVKPLVSKNFNKKVVEKMGLVYLVQYSPDQFKSSNIAKKELRKELMDLGFKVRYISENYKMMAIEGTATLQGVNPCQVWAYNMIKAPEAWAITGGSLSVKVAVLDTGIDHNHPSLANFVNTNLGRSFVGGNTMDVQGHGTHVAGTIASYGSVSGVMQQATLIPVKVLDNSGSGSLYGITQGILYAADIDADVINMSLGGGGYNQGMDEATQTAVAQGTIVVAATGNDGASSISYPAAYSSVIAVGSVDQNRVRSSFSNYGSGLELMAPGSNIYSTYPNGRYRTLSGTSMATPHVAGVAGLIRAANPDIVVAQARQILRDTAQEAGSFTQYGYGIVDAHAAVVAASGGSGG

SEQ ID NO: 1555 - DNA, 1239 bp, synthetic construct
  misc_feature 1..1239: note = Variant of serine peptidase from Bacillus sinesaloumensis
  source 1..1239: mol_type = other DNA
atggcagatcaagctagtcaagctaatggaaaccaggacgtcattgaaggcgagctgatcgtttcagtggaaccgaagaacggtaaacctgatgtgagcattcaaagtgcacaatccgtaacagggcaggaagacgtccttaaatcgaaaggctttacgatcgttgataccttgcatgtagaggatagcagcgtcaagccactcgtctcgaagaatttcaataagaaagtggtggagaagatgggactggtgtatcttgttcaatactctccggaccagtttaaaagttccaacattgcgaagaaagaactcagaaaagaattgatggatctgggctttaaagtccgctatataagcgaaaattacaagatgatggcgatcgaaggtacagccactcttcagggggtgaatcctaatcaagtttgggcgtataatatgattaaagctccggaagcgtgggctattacgggcggatccctgagcgttaaagtagcagtcctggatacagggatcgaccataatcacccatccttggccaacttcgtgaatactaatcttggccgctcgtttgttggaggaaacaccatggatgttcaaggtcatggcacacatgttgctggcacgattgcatcttatgggagtgtaagcggagtgatgcagagtgcgacactgatcccggtcaaagtgctcgataattctggcagcgggtccctttacggtattacgcagggcatattgtatgccgccgacatcgatgcagacgtcattaacatgtctctgggtggaggaggctataatcagggcatggatgaggctactcaaacagcagttgctcagggaaccattgtagtagcagcgactggcaatgatggtgcatcgtcgatcagttatcctgctgcctacagcagcgtcattgcggtgggatctgtggaccaaaatcgtgttcgatcctcgttttctaactatggatctgggcttgaactgatggcaccgggcagcaacatctacagtacgtatcctaatggcagatatcgcacgttgagtggtacaagcatggctactccgcacgttgcgggcgtagctgggctcattcgcgcagccaacccagacatagtggtcgcgcaagcccgtcagattctgcgggataccgcgcaagaagcaggatcgttcacacagtacggctatggaatcgtcgatgctcatgccgccgttgttgctgcatccggtggttcgggcggc

SEQ ID NO: 1556 - protein, 413 aa, synthetic construct
  REGION 1..413: note = Variant of serine peptidase from Bacillus sinesaloumensis
MADQASQANGNQDVIEGELIVSVEPKNGKPDVSIQSAQSVTGQEDVLKSKGFTIVDTLHVEDSSVKPLVSKNFNKKVVEKMGLVYLVQYSPDQFKSSNIAKKELRKELMDLGFKVRYISENYKMMAIEGTATLQGVNPNQVWAYNMIKAPEAWAITGGSLSVKVAVLDTGIDHNHPSLANFVNTNLGRSFVGGNTMDVQGHGTHVAGTIASYGSVSGVMQSATLIPVKVLDNSGSGSLYGITQGILYAADIDADVINMSLGGGGYNQGMDEATQTAVAQGTIVVAATGNDGASSISYPAAYSSVIAVGSVDQNRVRSSFSNYGSGLELMAPGSNIYSTYPNGRYRTLSGTSMATPHVAGVAGLIRAANPDIVVAQARQILRDTAQEAGSFTQYGYGIVDAHAAVVAASGGSGG

SEQ ID NO: 1557 - DNA, 1239 bp, synthetic construct
  misc_feature 1..1239: note = Variant of serine peptidase from Bacillus sinesaloumensis
  source 1..1239: mol_type = other DNA
atggcagatcaagctagtcaagctaatggaaaccaggacgtcattgaaggcgagctgatcgtttcagtggaaccgaagaacggtaaacctgatgtgagcattcaaagtgcacaatccgtaacagggcaggaagacgtccttaaatcgaaaggctttacgatcgttgataccttgcatgtagaggatagcagcgtcaagccactcgtctcgaagaatttcaataagaaagtggtggagaagatgggactggtgtatcttgttcaatactctccggaccagtttaaaagttccaacattgcgaagaaagaactcagaaaagaattgatggatctgggctttaaagtccgctatataagcgaaaattacaagatgatggcgatcgaaggtacagccactcttcagggggtgaatccttgtcaagtttgggcgtataatatgattaaagctccggaagcgtgggctattgttggcggatccctgagcgttaaagtagcagtcctggatacagggatcgaccataatcacccatccttggccaacttcgtgaatactaatcttggccgctcgtttgttggaggaaacaccatggatgttcaaggtcatggcacacatgttgctggcacgattgcatcttatggggtcgtaagcggagtgatgcagagtgcgacactgatcccggtcaaagtgctcgataattctggcagcgggtccctttacggtattacgcagggcatattgtatgccgccgacatcgatgcagacgtcattaacatgtctctgggtggaggaggctataatcagggcatggatgaggctactcaaacagcagttgctcagggaaccattgtagtagcagcgactggcaatgatggtgcatcgtcgatcagttatcctgctgcctacagcagcgtcattgcggtgggatctgtggactgtaatcgtgttcgatcctcgttttctaactatggatctgggcttgaactgatggcaccgggcagcaacatctacagtacgtatcctaatggcagatatcgcacgttgagtggtacaagcatggctactccgcacgttgcgggcgtagctgggctcattcgcgcagccaacccagacatagtggtcgcgcaagcccgtcagattctgcgggataccgcgcaagaagcaggatcgttcacacagtacggctatggaatcgtcgatgctcatgccgccgttgttgctgcatccggtggttcgggcggc

SEQ ID NO: 1558 - protein, 413 aa, synthetic construct
  REGION 1..413: note = Variant of serine peptidase from Bacillus sinesaloumensis
MADQASQANGNQDVIEGELIVSVEPKNGKPDVSIQSAQSVTGQEDVLKSKGFTIVDTLHVEDSSVKPLVSKNFNKKVVEKMGLVYLVQYSPDQFKSSNIAKKELRKELMDLGFKVRYISENYKMMAIEGTATLQGVNPCQVWAYNMIKAPEAWAIVGGSLSVKVAVLDTGIDHNHPSLANFVNTNLGRSFVGGNTMDVQGHGTHVAGTIASYGVVSGVMQSATLIPVKVLDNSGSGSLYGITQGILYAADIDADVINMSLGGGGYNQGMDEATQTAVAQGTIVVAATGNDGASSISYPAAYSSVIAVGSVDCNRVRSSFSNYGSGLELMAPGSNIYSTYPNGRYRTLSGTSMATPHVAGVAGLIRAANPDIVVAQARQILRDTAQEAGSFTQYGYGIVDAHAAVVAASGGSGG

SEQ ID NO: 1559 - DNA, 1239 bp, synthetic construct
  misc_feature 1..1239: note = Variant of serine peptidase from Bacillus sinesaloumensis
  source 1..1239: mol_type = other DNA
atggcagatcaagctagtcaagctaatggaaaccaggacgtcattgaaggcgagctgatcgtttcagtggaaccgaagaacggtaaacctgatgtgagcattcaaagtgcacaatccgtaacagggcaggaagacgtccttaaatcgaaaggctttacgatcgttgataccttgcatgtagaggatagcagcgtcaagccactcgtctcgaagaatttcaataagaaagtggtggagaagatgggactggtgtatcttgttcaatactctccggaccagtttaaaagttccaacattgcgaagaaagaactcagaaaagaattgatggatctgggctttaaagtccgctatataagcgaaaattacaagatgatggcgatcgaaggtacagccactcttcagggggtgaatccttgtcaagtttgggcgtataatatgattaaagctccggaagcgtgggctattacgggcggatccctgagcgttaaagtagcagtcctggatacagggatcgaccataatcacccatccttggccaacttcgtgaatactaatcttggccgctcgtttgttggaggaaacaccatggatgttcaaggtcatggcacacatgttgctggcacgattgcatcttatgggagtgtaagcggagtgatgcagcaggcgacactgatcccggtcaaagtgctcgataatctgggcagcgggtccctttacggtattacgcagggcatattgtatgccgccgacatcgatgcagacgtcattaacatgtctctgggtggaggaggctataatcagggcatggatgaggctactcaaacagcagttgctcagggaaccattgtagtagcagcgactggcaatgatggtgcatcgtcgatcagttatcctgctgcctacagcagcgtcattgcggtgggatctgtggaccagaatcgtgttcgatcctcgttttctaactatggatctgggcttgaactgatggcaccgggcagcaacatctacagtacgtatcctaatggcagatatcgcacgttgagtggtacaagcatggctactccgcacgttgcgggcgtagctgggctcattcgcgcagccaacccagacatagtggtcgcgcaagcccgtcagattctgcgggataccgcgcaagaagcaggatcgttcacacagtacggctatggaatcgtcgatgctcatgccgccgttgttgctgcatccggtggttcgggcggc

SEQ ID NO: 1560 - protein, 413 aa, synthetic construct
  REGION 1..413: note = Variant of serine peptidase from Bacillus sinesaloumensis
MADQASQANGNQDVIEGELIVSVEPKNGKPDVSIQSAQSVTGQEDVLKSKGFTIVDTLHVEDSSVKPLVSKNFNKKVVEKMGLVYLVQYSPDQFKSSNIAKKELRKELMDLGFKVRYISENYKMMAIEGTATLQGVNPCQVWAYNMIKAPEAWAITGGSLSVKVAVLDTGIDHNHPSLANFVNTNLGRSFVGGNTMDVQGHGTHVAGTIASYGSVSGVMQQATLIPVKVLDNLGSGSLYGITQGILYAADIDADVINMSLGGGGYNQGMDEATQTAVAQGTIVVAATGNDGASSISYPAAYSSVIAVGSVDQNRVRSSFSNYGSGLELMAPGSNIYSTYPNGRYRTLSGTSMATPHVAGVAGLIRAANPDIVVAQARQILRDTAQEAGSFTQYGYGIVDAHAAVVAASGGSGG

SEQ ID NO: 1561 - DNA, 1239 bp, synthetic construct
  misc_feature 1..1239: note = Variant of serine peptidase from Bacillus sinesaloumensis
  source 1..1239: mol_type = other DNA
atggcagatcaagctagtcaagctaatggaaaccaggacgtcattgaaggcgagctgatcgtttcagtggaaccgaagaacggtaaacctgatgtgagcattcaaagtgcacaatccgtaacagggcaggaagacgtccttaaatcgaaaggctttacgatcgttgataccttgcatgtagaggatagcagcgtcaagccactcgtctcgaagaatttcaataagaaagtggtggagaagatgggactggtgtatcttgttcaatactctccggaccagtttaaaagttccaacattgcgaagaaagaactcagaaaagaattgatggatctgggctttaaagtccgctatataagcgaaaattacaagatgatggcgatcgaaggtacagccactcttcagggggtgaatcctaatcaagtttgggcgtataatatgattaaagctccggaagcgtgggctattgttggcggatccctgagcgttaaagtagcagtcctggatacagggatcgaccataatcacccatccttggccaacttcgtgaatactaatcttggccgctcgtttgttggaggaaacaccatggatgttcaaggtcatggcacacatgttgctggcacgattgcatcttatgggagtgtaagcggagtgatgcagcaggcgacactgatcccggtcaaagtgctcgataattctggcagcgggtccctttacggtattacgcagggcatattgtatgccgccgacatcgatgcagacgtcattaacatgtctctgggtggagggggctataatcagggcatggatgaggctactcaaacagcagttgctcagggaaccattgtagtagcagcgactggcaatgatggtgcatcgtcgatcagttatcctgctgcctacagcagcgtcattgcggtgggatctgtggaccaaaatcgtgttcgatcctcgttttctaactatggatctgggcttgaactgatggcaccgggcagcaacatctacagtacgtatcctaatggcagatatcgcacgttgagtggtacaagcatggctactccgcacgttgcgggcgtagctgggctcattcgcgcagccaacccagacatagtggtcgcgcaagcccgtcagattctgcgggataccgcgcaagaagcaggatcgttcacacagtacggctatggaatcgtcgatgctcatgccgccgttgttgctgcatccggtggttcgggcggc

SEQ ID NO: 1562 - protein, 413 aa, synthetic construct
  REGION 1..413: note = Variant of serine peptidase from Bacillus sinesaloumensis
MADQASQANGNQDVIEGELIVSVEPKNGKPDVSIQSAQSVTGQEDVLKSKGFTIVDTLHVEDSSVKPLVSKNFNKKVVEKMGLVYLVQYSPDQFKSSNIAKKELRKELMDLGFKVRYISENYKMMAIEGTATLQGVNPNQVWAYNMIKAPEAWAIVGGSLSVKVAVLDTGIDHNHPSLANFVNTNLGRSFVGGNTMDVQGHGTHVAGTIASYGSVSGVMQQATLIPVKVLDNSGSGSLYGITQGILYAADIDADVINMSLGGGGYNQGMDEATQTAVAQGTIVVAATGNDGASSISYPAAYSSVIAVGSVDQNRVRSSFSNYGSGLELMAPGSNIYSTYPNGRYRTLSGTSMATPHVAGVAGLIRAANPDIVVAQARQILRDTAQEAGSFTQYGYGIVDAHAAVVAASGGSGG

SEQ ID NO: 1563 - DNA, 1239 bp, synthetic construct
  misc_feature 1..1239: note = Variant of serine peptidase from Bacillus sinesaloumensis
  source 1..1239: mol_type = other DNA
atggcagatcaagctagtcaagctaatggaaaccaggacgtcattgaaggcgagctgatcgtttcagtggaaccgaagaacggtaaacctgatgtgagcattcaaagtgcacaatccgtaacagggcaggaagacgtccttaaatcgaaaggctttacgatcgttgataccttgcatgtagaggatagcagcgtcaagccactcgtctcgaagaatttcaataagaaagtggtggagaagatgggactggtgtatcttgttcaatactctccggaccagtttaaaagttccaacattgcgaagaaagaactcagaaaagaattgatggatctgggctttaaagtccgctatataagcgaaaattacaagatgatggcgatcgaaggtacagccactcttcagggggtggctcctctgcaagtttgggcgtataatatgattaaagctccggaagcgtgggctattacgggcggatccctgagcgttaaagtagcagtcctggatacagggatcgaccataatcacccatccttggccaacttcgtgaatactaatcttggccgctcgtttgttggaggaaacaccatggatgttcaaggtcatggcacacatgttgctggcacgattgcatcttatggggtcgtaagcggagtgatgcagagtgcgacactgatcccggtcaaagtgctcgataattctggcagcgggtccctttacggtattacgcagggcatattgtatgccgccgacatcgatgcagacgtcattaacatgtctctgggtggagggggctataatcagggcatggatgaggctactcaaacagcagttgctcagggaaccattgtagtagcagcgactggcaatgatggtgcatcgtcgatcagttatcctgctgcctacagcagcgtcattgcggtgggatctgtggaccaaaatcgtgttcgatcctcgttttctaactatggatctgggcttgaactgatggcaccgggcagcaacatctacagtacgtatcctaatggcagatatcgcacgttgagtggtacaagcatggctactccgcacgttgcgggcgtagctgggctcattcgcgcagccaacccagacatagtggtcgcgcaagcccgtcagattctgcgggataccgcgcaagaagcaggatcgttcacacagtacggctatggaatcgtcgatgctcatgccgccgttgttgctgcatccggtggttcgggcggc

SEQ ID NO: 1564 - protein, 413 aa, synthetic construct
  REGION 1..413: note = Variant of serine peptidase from Bacillus sinesaloumensis
MADQASQANGNQDVIEGELIVSVEPKNGKPDVSIQSAQSVTGQEDVLKSKGFTIVDTLHVEDSSVKPLVSKNFNKKVVEKMGLVYLVQYSPDQFKSSNIAKKELRKELMDLGFKVRYISENYKMMAIEGTATLQGVAPLQVWAYNMIKAPEAWAITGGSLSVKVAVLDTGIDHNHPSLANFVNTNLGRSFVGGNTMDVQGHGTHVAGTIASYGVVSGVMQSATLIPVKVLDNSGSGSLYGITQGILYAADIDADVINMSLGGGGYNQGMDEATQTAVAQGTIVVAATGNDGASSISYPAAYSSVIAVGSVDQNRVRSSFSNYGSGLELMAPGSNIYSTYPNGRYRTLSGTSMATPHVAGVAGLIRAANPDIVVAQARQILRDTAQEAGSFTQYGYGIVDAHAAVVAASGGSGG

SEQ ID NO: 1565 - DNA, 1239 bp, synthetic construct
  misc_feature 1..1239: note = Variant of serine peptidase from Bacillus sinesaloumensis
  source 1..1239: mol_type = other DNA
atggcagatcaagctagtcaagctaatggaaaccaggacgtcattgaaggcgagctgatcgtttcagtggaaccgaagaacggtaaacctgatgtgagcattcaaagtgcacaatccgtaacagggcaggaagacgtccttaaatcgaaaggctttacgatcgttgataccttgcatgtagaggatagcagcgtcaagccactcgtctcgaagaatttcaataagaaagtggtggagaagatgggactggtgtatcttgttcaatactctccggaccagtttaaaagttccaacattgcgaagaaagaactcagaaaagaattgatggatctgggctttaaagtccgctatataagcgaaaattacaagatgatggcgatcgaaggtacagccactcttcagggggtgcacccttgtcaagtttgggcgtataatatgattaaagctccggaagcgtgggctattacgggcggatccctgagcgttaaagtagcagtcctggatacagggatcgaccataatcacccatccttggccaacttcgtgaatactaatcttggccgctcgtttgttggaggaaacaccatggatgttcaaggtcatggcacacatgttgctggcacgattgcatcttatgggagtgtaagcggagtgatgcagtcggcgacactgatcccggtcaaagtgctcgataattctggcagcgggtccctttacggtattacgcagggcatattgtatgccgccgacatcgatgcagacgtcattaacatgtctctgggtggagggggctataatcagggcatggatgaggctactcaaacagcagttgctcagggaaccattgtagtagcagcgactggcaatgatggtgcatcgtcgatcagttatcctgctgcctacagcagcgtcattgcggtgggatctgtggaccaaaatcgtgttcgatcctcgttttctaactatggatctgggcttgaactgatggcaccgggcagcaacatctacagtacgtatcctaatggcagatatcgcacgttgagtggtacaagcatggctactccgcacgttgcgggcgtagctgggctcattcgcgcagccaacccagacatagtggtcgcgcaagcccgtcagattctgcgggataccgcgcaagaagcaggatcgttcacacagtacggctatggaatcgtcgatgctcatgccgccgttgttgctgcatccggtggttcgggcgac

SEQ ID NO: 1566 - protein, 413 aa, synthetic construct
  REGION 1..413: note = Variant of serine peptidase from Bacillus sinesaloumensis
MADQASQANGNQDVIEGELIVSVEPKNGKPDVSIQSAQSVTGQEDVLKSKGFTIVDTLHVEDSSVKPLVSKNFNKKVVEKMGLVYLVQYSPDQFKSSNIAKKELRKELMDLGFKVRYISENYKMMAIEGTATLQGVHPCQVWAYNMIKAPEAWAITGGSLSVKVAVLDTGIDHNHPSLANFVNTNLGRSFVGGNTMDVQGHGTHVAGTIASYGSVSGVMQSATLIPVKVLDNSGSGSLYGITQGILYAADIDADVINMSLGGGGYNQGMDEATQTAVAQGTIVVAATGNDGASSISYPAAYSSVIAVGSVDQNRVRSSFSNYGSGLELMAPGSNIYSTYPNGRYRTLSGTSMATPHVAGVAGLIRAANPDIVVAQARQILRDTAQEAGSFTQYGYGIVDAHAAVVAASGGSGD

SEQ ID NO: 1567 - DNA, 1239 bp, synthetic construct
  misc_feature 1..1239: note = Variant of serine peptidase from Bacillus sinesaloumensis
  source 1..1239: mol_type = other DNA
atggcagatcaagctagtcaagctaatggaaaccaggacgtcattgaaggcgagctgatcgtttcagtggaaccgaagaacggtaaacctgatgtgagcattcaaagtgcacaatccgtaacagggcaggaagacgtccttaaatcgaaaggctttacgatcgttgataccttgcatgtagaggatagcagcgtcaagccactcgtctcgaagaatttcaataagaaagtggtggagaagatgggactggtgtatcttgttcaatactctccggaccagtttaaaagttccaacattgcgaagaaagaactcagaaaagaattgatggatctgggctttaaagtccgctatataagcgaaaattacaagatgatggcgatcgaaggtacagccactcttcagggggtgcatccttgtcaagtttgggcgtataatatgattaaagctccggaagcgtgggctattacgggcggatccctgagcgttaaagtagcagtcctggatacagggatcgaccataatcacccatccttggccaacttcgtgaatactaatcttggccgctcgtttgttggaggaaacaccatggatgttcaaggtcatggcacacatgttgctggcacgattgcatcttatgggagtgtaagcggagtgatgcagagtgcgacactgatcccggtcaaagtgctcgataattctggcagcgggtccctttacggtattacgcagggcatattgtatgccgccgacatcgatgcagacgtcattaacatgtctctgggtggaggaggctataatcagggcatggatgaggctactcaaacagcagttgctaagggaaccattgtagtagcagcgactggcaatgatggtgcatcgtcgatcagttatcctgctgcctacagcagcgtcattgcggtgggatctgtggaccaaaatcgtgttcgatcctcgttttctaactatggatctgggcttgaactgatggcaccgggcagcaacatctacagtacgtatcctaatggcagatatcgcacgttgagtggtacaagcatggctactccgcacgttgcgggcgtagctgggctcattcgcgcagccaacccagacatagtggtcgcgcaagcccgtcagattctgcgggataccgcgcaagaagcaggatcgttcacacagtacggctatggaatcgtcgatgctcatgccgccgttgttgctgcatccggtggttcgggcggc

SEQ ID NO: 1568 - protein, 413 aa, synthetic construct
  REGION 1..413: note = Variant of serine peptidase from Bacillus sinesaloumensis
MADQASQANGNQDVIEGELIVSVEPKNGKPDVSIQSAQSVTGQEDVLKSKGFTIVDTLHVEDSSVKPLVSKNFNKKVVEKMGLVYLVQYSPDQFKSSNIAKKELRKELMDLGFKVRYISENYKMMAIEGTATLQGVHPCQVWAYNMIKAPEAWAITGGSLSVKVAVLDTGIDHNHPSLANFVNTNLGRSFVGGNTMDVQGHGTHVAGTIASYGSVSGVMQSATLIPVKVLDNSGSGSLYGITQGILYAADIDADVINMSLGGGGYNQGMDEATQTAVAKGTIVVAATGNDGASSISYPAAYSSVIAVGSVDQNRVRSSFSNYGSGLELMAPGSNIYSTYPNGRYRTLSGTSMATPHVAGVAGLIRAANPDIVVAQARQILRDTAQEAGSFTQYGYGIVDAHAAVVAASGGSGG

SEQ ID NO: 1569 - DNA, 1239 bp, synthetic construct
  misc_feature 1..1239: note = Variant of serine peptidase from Bacillus sinesaloumensis
  source 1..1239: mol_type = other DNA
atggcagatcaagctagtcaagctaatggaaaccaggacgtcattgaaggcgagctgatcgtttcagtggaaccgaagaacggtaaacctgatgtgagcattcaaagtgcacaatccgtaacagggcaggaagacgtccttaaatcgaaaggctttacgatcgttgataccttgcatgtagaggatagcagcgtcaagccactcgtctcgaagaatttcaataagaaagtggtggagaagatgggactggtgtatcttgttcaatactctccggaccagtttaaaagttccaacattgcgaagaaagaactcagaaaagaattgatggatctgggctttaaagtccgctatataagcgaaaattacaagatgatggcgatcgaaggtacagccactcttcagggggtgcacccttgtcaagtttgggcgtataatatgattaaagctccggaagcgtgggctattacgggcggatccctgagcgttaaagtagcagtcctggatacagggatcgaccataatcacccatccttggccaacttcgtgaatactaatcttggccgctcgtttgttggaggaaacaccatggatgttcaaggtcatggcacacatgttgctggcacgattgcatcttatgggtcggtaagcggagtgatgcagagtgcgacactgatcccggtcaaagtgctcgataattctggcagcgggtccctttacggtattacgcagggcatattgtatgccgccgacatcgatgcagacgtcattaacatgtctctgggtggaggaggctataatcagggcatggatgaggctactcaaacagcagttgctatgggaaccattgtagtagcagcgactggcaatgatggtgcatcgtcgatcagttatcctgctgcctacagcagcgtcattgcggtgggatctgtggaccagaatcgtgttcgatcctcgttttctaactatggatctgggcttgaactgatggcaccgggcagcaacatctacagtacgtatcctaatggcagatatcgcacgttgagtggtacaagcatggctactccgcacgttgcgggcgtagctgggctcattcgcgcagccaacccagacatagtggtcgcgcaagcccgtcagattctgcgggataccgcgcaagaagcaggatcgttcacacagtacggctatggaatcgtcgatgctcatgccgccgttgttgctgcatccggtggttcgggcggc

SEQ ID NO: 1570 - protein, 413 aa, synthetic construct
  REGION 1..413: note = Variant of serine peptidase from Bacillus sinesaloumensis
MADQASQANGNQDVIEGELIVSVEPKNGKPDVSIQSAQSVTGQEDVLKSKGFTIVDTLHVEDSSVKPLVSKNFNKKVVEKMGLVYLVQYSPDQFKSSNIAKKELRKELMDLGFKVRYISENYKMMAIEGTATLQGVHPCQVWAYNMIKAPEAWAITGGSLSVKVAVLDTGIDHNHPSLANFVNTNLGRSFVGGNTMDVQGHGTHVAGTIASYGSVSGVMQSATLIPVKVLDNSGSGSLYGITQGILYAADIDADVINMSLGGGGYNQGMDEATQTAVAMGTIVVAATGNDGASSISYPAAYSSVIAVGSVDQNRVRSSFSNYGSGLELMAPGSNIYSTYPNGRYRTLSGTSMATPHVAGVAGLIRAANPDIVVAQARQILRDTAQEAGSFTQYGYGIVDAHAAVVAASGGSGG

SEQ ID NO: 1571 - DNA, 1239 bp, synthetic construct
  misc_feature 1..1239: note = Variant of serine peptidase from Bacillus sinesaloumensis
  source 1..1239: mol_type = other DNA
atggcagatcaagctagtcaagctaatggaaaccaggacgtcattgaaggcgagctgatcgtttcagtggaaccgaagaacggtaaacctgatgtgagcattcaaagtgcacaatccgtaacagggcaggaagacgtccttaaatcgaaaggctttacgatcgttgataccttgcatgtagaggatagcagcgtcaagccactcgtctcgaagaatttcaataagaaagtggtggagaagatgggactggtgtatcttgttcaatactctccggaccagtttaaaagttccaacattgcgaagaaagaactcagaaaagaattgatggatctgggctttaaagtccgctatataagcgaaaattacaagatgatggcgatcgaaggtacagccactcttcagggggtggctcctctgcaagtttgggcgtataatatgattaaagctccggaagcgtgggctattacgggcggatccctgagcgttaaagtagcagtcctggatacagggatcgaccataatcacccatccttggccaacttcgtgaatactaatcttggccgctcgtttgttggaggaaacaccatggatgttcaaggtcatggcacacatgttgctggcacgattgcatcttatgggagtgtaagcggagtgatgcagagtgcgacactgatcccggtcaaagtgctcgataatctgggcagcgggtccctttacggtattacgcagggcatattgtatgccgccgacatcgatgcagacgtcattaacatgtctctgggtggaggaggctataatcagggcatggatgaggctactcaaacagcagttgctcagggaaccattgtagtagcagcgactggcaatgatggtgcatcgtcgatcagttatcctgctgcctacagcagcgtcattgcggtgggatctgtggaccaaaatcgtgttcgatcctcgttttctaactatggatctgggcttgaactgatggcaccgggcagcaacatctacagtacgtatcctaatggcagatatcgcacgttgagtggtacaagcatggctactccgcacgttgcgggcgtagctgggctcattcgcgcagccaacccagacatagtggtcgcgcaagcccgtcagattctgcgggataccgcgcaagaagcaggatcgttcacacagtacggctatggaatcgtcgatgctcatgccgccgttgttgctgcatccggtggttcgggcggc

SEQ ID NO: 1572 - protein, 413 aa, synthetic construct
  REGION 1..413: note = Variant of serine peptidase from Bacillus sinesaloumensis
MADQASQANGNQDVIEGELIVSVEPKNGKPDVSIQSAQSVTGQEDVLKSKGFTIVDTLHVEDSSVKPLVSKNFNKKVVEKMGLVYLVQYSPDQFKSSNIAKKELRKELMDLGFKVRYISENYKMMAIEGTATLQGVAPLQVWAYNMIKAPEAWAITGGSLSVKVAVLDTGIDHNHPSLANFVNTNLGRSFVGGNTMDVQGHGTHVAGTIASYGSVSGVMQSATLIPVKVLDNLGSGSLYGITQGILYAADIDADVINMSLGGGGYNQGMDEATQTAVAQGTIVVAATGNDGASSISYPAAYSSVIAVGSVDQNRVRSSFSNYGSGLELMAPGSNIYSTYPNGRYRTLSGTSMATPHVAGVAGLIRAANPDIVVAQARQILRDTAQEAGSFTQYGYGIVDAHAAVVAASGGSGG

SEQ ID NO: 1573 - DNA, 1239 bp, synthetic construct
  misc_feature 1..1239: note = Variant of serine peptidase from Bacillus sinesaloumensis
  source 1..1239: mol_type = other DNA
atggcagatcaagctagtcaagctaatggaaaccaggacgtcattgaaggcgagctgatcgtttcagtggaaccgaagaacggtaaacctgatgtgagcattcaaagtgcacaatccgtaacagggcaggaagacgtccttaaatcgaaaggctttacgatcgttgataccttgcatgtagaggatagcagcgtcaagccactcgtctcgaagaatttcaataagaaagtggtggagaagatgggactggtgtatcttgttcaatactctccggaccagtttaaaagttccaacattgcgaagaaagaactcagaaaagaattgatggatctgggctttaaagtccgctatataagcgaaaattacaagatgatggcgatcgaaggtacagccactcttcagggggtgaatcctaatcaagtttgggcgtataatatgattaaagctccggaagcgtgggctattacgggcggatccctgagcgttaaagtagcagtcctggatacagggatcgaccataatcacccatccttggccaacttcgtgaatactaatcttggccgctcgtttgttggaggaaacaccatggatgttcaaggtcatggcacacatgttgctggcacgattgcatcttatggggtcgtaagcggagtgatgcagtcggcgacactgatcccggtcaaagtgctcgataatatcggcagcgggtccctttacggtattacgcagggcatattgtatgccgccgacatcgatgcagacgtcattaacatgtctctgggtggaggaggctataatcagggcatggatgaggctactcaaacagcagttgctcagggaaccattgtagtagcagcgactggcaatgatggtgcatcgtcgatcagttatcctgctgcctacagcagcgtcattgcggtgggatctgtggaccaaaatcgtgttcgatcctcgttttctaactatggatctgggcttgaactgatggcaccgggcagcaacatctacagtacgtatcctaatggcagatatcgcacgttgagtggtacaagcatggctactccgcacgttgcgggcgtagctgggctcattcgcgcagccaacccagacatagtggtcgcgcaagcccgtcagattctgcgggataccgcgcaagaagcaggatcgttcacacagtacggctatggaatcgtcgatgctcatgccgccgttgttgctgcatccggtggttcgggcggc

SEQ ID NO: 1574 - protein, 413 aa, synthetic construct
  REGION 1..413: note = Variant of serine peptidase from Bacillus sinesaloumensis
MADQASQANGNQDVIEGELIVSVEPKNGKPDVSIQSAQSVTGQEDVLKSKGFTIVDTLHVEDSSVKPLVSKNFNKKVVEKMGLVYLVQYSPDQFKSSNIAKKELRKELMDLGFKVRYISENYKMMAIEGTATLQGVNPNQVWAYNMIKAPEAWAITGGSLSVKVAVLDTGIDHNHPSLANFVNTNLGRSFVGGNTMDVQGHGTHVAGTIASYGVVSGVMQSATLIPVKVLDNIGSGSLYGITQGILYAADIDADVINMSLGGGGYNQGMDEATQTAVAQGTIVVAATGNDGASSISYPAAYSSVIAVGSVDQNRVRSSFSNYGSGLELMAPGSNIYSTYPNGRYRTLSGTSMATPHVAGVAGLIRAANPDIVVAQARQILRDTAQEAGSFTQYGYGIVDAHAAVVAASGGSGG

SEQ ID NO: 1575 - DNA, 1239 bp, synthetic construct
  misc_feature 1..1239: note = Variant of serine peptidase from Bacillus sinesaloumensis
  source 1..1239: mol_type = other DNA
atggcagatcaagctagtcaagctaatggaaaccaggacgtcattgaaggcgagctgatcgtttcagtggaaccgaagaacggtaaacctgatgtgagcattcaaagtgcacaatccgtaacagggcaggaagacgtccttaaatcgaaaggctttacgatcgttgataccttgcatgtagaggatagcagcgtcaagccactcgtctcgaagaatttcaataagaaagtggtggagaagatgggactggtgtatcttgttcaatactctccggaccagtttaaaagttccaacattgcgaagaaagaactcagaaaagaattgatggatctgggctttaaagtccgctatataagcgaaaattacaagatgatggcgatcgaaggtacagccactcttcagggggtgcacccttgtcaagtttgggcgtataatatgattaaagctccggaagcgtgggctattacgggcggatccctgagcgttaaagtagcagtcctggatacagggatcgaccataatcacccatccttggccaacttcgtgaatactaatcttggccgctcgtttgttggaggaaacaccatggatgttcaaggtcatggcacacatgttgctggcacgattgcatcttatgggagtgtaagcggagtgatgcagcaggcgacactgatcccggtcaaagtgctcgataattctggcagcgggtccctttacggtattacgcagggcatattgtatgccgccgacatcgatgcagacgtcattaacatgtctctgggtggaggaggctataatcagggcatggatgaggctactcaaacagcagttgctcagggaaccattgtagtagcagcgactggcaatgatggtgcatcgtcgatcagttatcctgctgcctacagcagcgtcattgcggtgggatctgtggaccaaaatcgtgttcgatcctcgttttctaactatggatctgggcttgaactgatggcaccgggcagcaacatctacagtacgtatcctaatggcagatatcgcacgttgagtggtacaagcatggctactccgcacgttgcgggcgtagctgggctcattcgcgcagccaacccagacatagtggtcgcgcaagcccgtcagattctgcgggataccgcgcaagaagcaggatcgttcacacagtacggctatggaatcgtcgatgctcatgccgccgttgttgctgcatccggtggttcgggcgac

SEQ ID NO: 1576 - protein, 413 aa, synthetic construct
  REGION 1..413: note = Variant of serine peptidase from Bacillus sinesaloumensis
MADQASQANGNQDVIEGELIVSVEPKNGKPDVSIQSAQSVTGQEDVLKSKGFTIVDTLHVEDSSVKPLVSKNFNKKVVEKMGLVYLVQYSPDQFKSSNIAKKELRKELMDLGFKVRYISENYKMMAIEGTATLQGVHPCQVWAYNMIKAPEAWAITGGSLSVKVAVLDTGIDHNHPSLANFVNTNLGRSFVGGNTMDVQGHGTHVAGTIASYGSVSGVMQQATLIPVKVLDNSGSGSLYGITQGILYAADIDADVINMSLGGGGYNQGMDEATQTAVAQGTIVVAATGNDGASSISYPAAYSSVIAVGSVDQNRVRSSFSNYGSGLELMAPGSNIYSTYPNGRYRTLSGTSMATPHVAGVAGLIRAANPDIVVAQARQILRDTAQEAGSFTQYGYGIVDAHAAVVAASGGSGD

SEQ ID NO: 1577 - DNA, 1239 bp, synthetic construct
  misc_feature 1..1239: note = Variant of serine peptidase from Bacillus sinesaloumensis
  source 1..1239: mol_type = other DNA
atggcagatcaagctagtcaagctaatggaaaccaggacgtcattgaaggcgagctgatcgtttcagtggaaccgaagaacggtaaacctgatgtgagcattcaaagtgcacaatccgtaacagggcaggaagacgtccttaaatcgaaaggctttacgatcgttgataccttgcatgtagaggatagcagcgtcaagccactcgtctcgaagaatttcaataagaaagtggtggagaagatgggactggtgtatcttgttcaatactctccggaccagtttaaaagttccaacattgcgaagaaagaactcagaaaagaattgatggatctgggctttaaagtccgctatataagcgaaaattacaagatgatggcgatcgaaggtacagccactcttcagggggtgaatccttgtcaagtttgggcgtataatatgattaaagctccggaagcgtgggctattacgggcggatccctgagcgttaaagtagcagtcctggatacagggatcgaccataatcacccatccttggccaacttcgtgaatactaatcttggccgctcgtttgttggaggaaacaccatggatgttcaaggtcatggcacacatgttgctggcacgattgcatcttatggggtcgtaagcggagtgatgcagagtgcgacactgatcccggtcaaagtgctcgataatctgggcagcgggtccctttacggtattacgcagggcatattgtatgccgccgacatcgatgcagacgtcattaacatgtctctgggtggagggggctataatcagggcatggatgaggctactcaaacagcagttgctcaaggaaccattgtagtagcagcgactggcaatgatggtgcatcgtcgatcagttatcctgctgcctacagcagcgtcattgcggtgggatctgtggaccagaatcgtgttcgatcctcgttttctaactatggatctgggcttgaactgatggcaccgggcagcaacatctacagtacgtatcctaatggcagatatcgcacgttgagtggtacaagcatggctactccgcacgttgcgggcgtagctgggctcattcgcgcagccaacccagacatagtggtcgcgcaagcccgtcagattctgcgggataccgcgcaagaagcaggatcgttcacacagtacggctatggaatcgtcgatgctcatgccgccgttgttgctgcatccggtggttcgggcggc

SEQ ID NO: 1578 - protein, 413 aa, synthetic construct
  REGION 1..413: note = Variant of serine peptidase from Bacillus sinesaloumensis
MADQASQANGNQDVIEGELIVSVEPKNGKPDVSIQSAQSVTGQEDVLKSKGFTIVDTLHVEDSSVKPLVSKNFNKKVVEKMGLVYLVQYSPDQFKSSNIAKKELRKELMDLGFKVRYISENYKMMAIEGTATLQGVNPCQVWAYNMIKAPEAWAITGGSLSVKVAVLDTGIDHNHPSLANFVNTNLGRSFVGGNTMDVQGHGTHVAGTIASYGVVSGVMQSATLIPVKVLDNLGSGSLYGITQGILYAADIDADVINMSLGGGGYNQGMDEATQTAVAQGTIVVAATGNDGASSISYPAAYSSVIAVGSVDQNRVRSSFSNYGSGLELMAPGSNIYSTYPNGRYRTLSGTSMATPHVAGVAGLIRAANPDIVVAQARQILRDTAQEAGSFTQYGYGIVDAHAAVVAASGGSGG

SEQ ID NO: 1579 - DNA, 1239 bp, synthetic construct
  misc_feature 1..1239: note = Variant of serine peptidase from Bacillus sinesaloumensis
  source 1..1239: mol_type = other DNA
atggcagatcaagctagtcaagctaatggaaaccaggacgtcattgaaggcgagctgatcgtttcagtggaaccgaagaacggtaaacctgatgtgagcattcaaagtgcacaatccgtaacagggcaggaagacgtccttaaatcgaaaggctttacgatcgttgataccttgcatgtagaggatagcagcgtcaagccactcgtctcgaagaatttcaataagaaagtggtggagaagatgggactggtgtatcttgttcaatactctccggaccagtttaaaagttccaacattgcgaagaaagaactcagaaaagaattgatggatctgggctttaaagtccgctatataagcgaaaattacaagatgatggcgatcgaaggtacagccactcttcagggggtggctcctctgcaagtttgggcgtataatatgattaaagctccggaagcgtgggctattacgggcggatccctgagcgttaaagtagcagtcctggatacagggatcgaccataatcacccatccttggccaacttcgtgaatactaatcttggccgctcgtttgttggaggaaacaccatggatgttcaaggtcatggcacacatgttgctggcacgattgcatcttatgggccggtaagcggagtgatgcagagtgcgacactgatcccggtcaaagtgctcgataattctggcagcgggtccctttacggtattacgcagggcatattgtatgccgccgacatcgatgcagacgtcattaacatgtctctgggtggagggggctataatcagggcatggatgaggctactcaaacagcagttgctcaaggaaccattgtagtagcagcgactggcaatgatggtgcatcgtcgatcagttatcctgctgcctacagcagcgtcattgcggtgggatctgtggaccaaaatcgtgttcgatcctcgttttctaactatggatctgggcttgaactgatggcaccgggcagcaacatctacagtacgtatcctaatggcagatatcgcacgttgagtggtacaagcatggctactccgcacgttgcgggcgtagctgggctcattcgcgcagccaacccagacatagtggtcgcgcaagcccgtcagattctgcgggataccgcgcaagaagcaggatcgttcacacagtacggctatggaatcgtcgatgctcatgccgccgttgttgctgcatccggtggttcgggcggc

SEQ ID NO: 1580 - protein, 413 aa, synthetic construct
  REGION 1..413: note = Variant of serine peptidase from Bacillus sinesaloumensis
MADQASQANGNQDVIEGELIVSVEPKNGKPDVSIQSAQSVTGQEDVLKSKGFTIVDTLHVEDSSVKPLVSKNFNKKVVEKMGLVYLVQYSPDQFKSSNIAKKELRKELMDLGFKVRYISENYKMMAIEGTATLQGVAPLQVWAYNMIKAPEAWAITGGSLSVKVAVLDTGIDHNHPSLANFVNTNLGRSFVGGNTMDVQGHGTHVAGTIASYGPVSGVMQSATLIPVKVLDNSGSGSLYGITQGILYAADIDADVINMSLGGGGYNQGMDEATQTAVAQGTIVVAATGNDGASSISYPAAYSSVIAVGSVDQNRVRSSFSNYGSGLELMAPGSNIYSTYPNGRYRTLSGTSMATPHVAGVAGLIRAANPDIVVAQARQILRDTAQEAGSFTQYGYGIVDAHAAVVAASGGSGG

SEQ ID NO: 1581 - DNA, 1239 bp, synthetic construct
  misc_feature 1..1239: note = Variant of serine peptidase from Bacillus sinesaloumensis
  source 1..1239: mol_type = other DNA
atggcagatcaagctagtcaagctaatggaaaccaggacgtcattgaaggcgagctgatcgtttcagtggaaccgaagaacggtaaacctgatgtgagcattcaaagtgcacaatccgtaacagggcaggaagacgtccttaaatcgaaaggctttacgatcgttgataccttgcatgtagaggatagcagcgtcaagccactcgtctcgaagaatttcaataagaaagtggtggagaagatgggactggtgtatcttgttcaatactctccggaccagtttaaaagttccaacattgcgaagaaagaactcagaaaagaattgatggatctgggctttaaagtccgctatataagcgaaaattacaagatgatggcgatcgaaggtacagccactcttcagggggtgaatcctaatcaagtttgggcgtataatatgattaaagctccggaagcgtgggctattacgggcggatccctgagcgttaaagtagcagtcctggatacagggatcgaccataatcacccatccttggccaacttcgtgaatactaatcttggccgctcgtttgttggaggaaacaccatggatgttcaaggtcatggcacacatgttgctggcacgattgcatcttatgggagtgtaagcggagtgatgcagcaggcgacactgatcccggtcaaagtgctcgataatctgggcagcgggtccctttacggtattacgcagggcatattgtatgccgccgacatcgatgcagacgtcattaacatgtctctgggtggagggggctataatcagggcatggatgaggctactcaaacagcagttgctatgggaaccattgtagtagcagcgactggcaatgatggtgcatcgtcgatcagttatcctgctgcctacagcagcgtcattgcggtgggatctgtggaccaaaatcgtgttcgatcctcgttttctaactatggatctgggcttgaactgatggcaccgggcagcaacatctacagtacgtatcctaatggcagatatcgcacgttgagtggtacaagcatggctactccgcacgttgcgggcgtagctgggctcattcgcgcagccaacccagacatagtggtcgcgcaagcccgtcagattctgcgggataccgcgcaagaagcaggatcgttcacacagtacggctatggaatcgtcgatgctcatgccgccgttgttgctgcatccggtggttcgggcggc

SEQ ID NO: 1582 - protein, 413 aa, synthetic construct
  REGION 1..413: note = Variant of serine peptidase from Bacillus sinesaloumensis
MADQASQANGNQDVIEGELIVSVEPKNGKPDVSIQSAQSVTGQEDVLKSKGFTIVDTLHVEDSSVKPLVSKNFNKKVVEKMGLVYLVQYSPDQFKSSNIAKKELRKELMDLGFKVRYISENYKMMAIEGTATLQGVNPNQVWAYNMIKAPEAWAITGGSLSVKVAVLDTGIDHNHPSLANFVNTNLGRSFVGGNTMDVQGHGTHVAGTIASYGSVSGVMQQATLIPVKVLDNLGSGSLYGITQGILYAADIDADVINMSLGGGGYNQGMDEATQTAVAMGTIVVAATGNDGASSISYPAAYSSVIAVGSVDQNRVRSSFSNYGSGLELMAPGSNIYSTYPNGRYRTLSGTSMATPHVAGVAGLIRAANPDIVVAQARQILRDTAQEAGSFTQYGYGIVDAHAAVVAASGGSGG

SEQ ID NO: 1583 - DNA, 1239 bp, synthetic construct
  misc_feature 1..1239: note = Variant of serine peptidase from Bacillus sinesaloumensis
  source 1..1239: mol_type = other DNA
atggcagatcaagctagtcaagctaatggaaaccaggacgtcattgaaggcgagctgatcgtttcagtggaaccgaagaacggtaaacctgatgtgagcattcaaagtgcacaatccgtaacagggcaggaagacgtccttaaatcgaaaggctttacgatcgttgataccttgcatgtagaggatagcagcgtcaagccactcgtctcgaagaatttcaataagaaagtggtggagaagatgggactggtgtatcttgttcaatactctccggaccagtttaaaagttccaacattgcgaagaaagaactcagaaaagaattgatggatctgggctttaaagtccgctatataagcgaaaattacaagatgatggcgatcgaaggtacagccactcttcagggggtgaatccttgtcaagtttgggcgtataatatgattaaagctccggaagcgtgggctattgttggcggatccctgagcgttaaagtagcagtcctggatacagggatcgaccataatcacccatccttggccaacttcgtgaatactaatcttggccgctcgtttgttggaggaaacaccatggatgttcaaggtcatggcacacatgttgctggcacgattgcatcttatgggagtgtaagcggagtgatgcagtcggcgacactgatcccggtcaaagtgctcgataattctggcagcgggtccctttacggtattacgcagggcatattgtatgccgccgacatcgatgcagacgtcattaacatgtctctgggtggaggaggctataatcagggcatggatgaggctactcaaacagcagttgctcagggaaccattgtagtagcagcgactggcaatgatggtgcatcgtcgatcagttatcctgctgcctacagcagcgtcattgcggtgggatctgtggaccaaaatcgtgttcgatcctcgttttctaactatggatctgggcttgaactgatggcaccgggcagcaacatctacagtacgtatcctaatggcagatatcgcacgttgagtggtacaagcatggctactccgcacgttgcgggcgtagctgggctcattcgcgcagccaacccagacatagtggtcgcgcaagcccgtcagattctgcgggataccgcgcaagaagcaggatcgttcacacagtacggctatggaatcgtcgatgctcatgccgccgttgttgctgcatccggtggttcgggcggc

SEQ ID NO: 1584 - protein, 413 aa, synthetic construct
  REGION 1..413: note = Variant of serine peptidase from Bacillus sinesaloumensis
MADQASQANGNQDVIEGELIVSVEPKNGKPDVSIQSAQSVTGQEDVLKSKGFTIVDTLHVEDSSVKPLVSKNFNKKVVEKMGLVYLVQYSPDQFKSSNIAKKELRKELMDLGFKVRYISENYKMMAIEGTATLQGVNPCQVWAYNMIKAPEAWAIVGGSLSVKVAVLDTGIDHNHPSLANFVNTNLGRSFVGGNTMDVQGHGTHVAGTIASYGSVSGVMQSATLIPVKVLDNSGSGSLYGITQGILYAADIDADVINMSLGGGGYNQGMDEATQTAVAQGTIVVAATGNDGASSISYPAAYSSVIAVGSVDQNRVRSSFSNYGSGLELMAPGSNIYSTYPNGRYRTLSGTSMATPHVAGVAGLIRAANPDIVVAQARQILRDTAQEAGSFTQYGYGIVDAHAAVVAASGGSGG

SEQ ID NO: 1585 - DNA, 1239 bp, synthetic construct
  misc_feature 1..1239: note = Variant of serine peptidase from Bacillus sinesaloumensis
  source 1..1239: mol_type = other DNA
atggcagatcaagctagtcaagctaatggaaaccaggacgtcattgaaggcgagctgatcgtttcagtggaaccgaagaacggtaaacctgatgtgagcattcaaagtgcacaatccgtaacagggcaggaagacgtccttaaatcgaaaggctttacgatcgttgataccttgcatgtagaggatagcagcgtcaagccactcgtctcgaagaatttcaataagaaagtggtggagaagatgggactggtgtatcttgttcaatactctccggaccagtttaaaagttccaacattgcgaagaaagaactcagaaaagaattgatggatctgggctttaaagtccgctatataagcgaaaattacaagatgatggcgatcgaaggtacagccactcttcagggggtgaatcctctgcaagtttgggcgtataatatgattaaagctccggaagcgtgggctattacgggcggatccctgagcgttaaagtagcagtcctggatacagggatcgaccataatcacccatccttggccaacttcgtgaatactaatcttggccgctcgtttgttggaggaaacaccatggatgttcaaggtcatggcacacatgttgctggcacgattgcatcttatgggagtgtaagcggagtgatgcagcaggcgacactgatcccggtcaaagtgctcgataatatcggcagcgggtccctttacggtattacgcagggcatattgtatgccgccgacatcgatgcagacgtcattaacatgtctctgggtggaggaggctataatcagggcatggatgaggctactcaaacagcagttgctcagggaaccattgtagtagcagcgactggcaatgatggtgcatcgtcgatcagttatcctgctgcctacagcagcgtcattgcggtgggatctgtggaccaaaatcgtgttcgatcctcgttttctaactatggatctgggcttgaactgatggcaccgggcagcaacatctacagtacgtatcctaatggcagatatcgcacgttgagtggtacaagcatggctactccgcacgttgcgggcgtagctgggctcattcgcgcagccaacccagacatagtggtcgcgcaagcccgtcagattctgcgggataccgcgcaagaagcaggatcgttcacacagtacggctatggaatcgtcgatgctcatgccgccgttgttgctgcatccggtggttcgggcggc

SEQ ID NO: 1586 - protein, 413 aa, synthetic construct
  REGION 1..413: note = Variant of serine peptidase from Bacillus sinesaloumensis
MADQASQANGNQDVIEGELIVSVEPKNGKPDVSIQSAQSVTGQEDVLKSKGFTIVDTLHVEDSSVKPLVSKNFNKKVVEKMGLVYLVQYSPDQFKSSNIAKKELRKELMDLGFKVRYISENYKMMAIEGTATLQGVNPLQVWAYNMIKAPEAWAITGGSLSVKVAVLDTGIDHNHPSLANFVNTNLGRSFVGGNTMDVQGHGTHVAGTIASYGSVSGVMQQATLIPVKVLDNIGSGSLYGITQGILYAADIDADVINMSLGGGGYNQGMDEATQTAVAQGTIVVAATGNDGASSISYPAAYSSVIAVGSVDQNRVRSSFSNYGSGLELMAPGSNIYSTYPNGRYRTLSGTSMATPHVAGVAGLIRAANPDIVVAQARQILRDTAQEAGSFTQYGYGIVDAHAAVVAASGGSGG

SEQ ID NO: 1587 - DNA, 1239 bp, synthetic construct
  misc_feature 1..1239: note = Variant of serine peptidase from Bacillus sinesaloumensis
  source 1..1239: mol_type = other DNA
atggcagatcaagctagtcaagctaatggaaaccaggacgtcattgaaggcgagctgatcgtttcagtggaaccgaagaacggtaaacctgatgtgagcattcaaagtgcacaatccgtaacagggcaggaagacgtccttaaatcgaaaggctttacgatcgttgataccttgcatgtagaggatagcagcgtcaagccactcgtctcgaagaatttcaataagaaagtggtggagaagatgggactggtgtatcttgttcaatactctccggaccagtttaaaagttccaacattgcgaagaaagaactcagaaaagaattgatggatctgggctttaaagtccgctatataagcgaaaattacaagatgatggcgatcgaaggtacagccactcttcagggggtgcatccttgtcaagtttgggcgtataatatgattaaagctccggaagcgtgggctattacgggcggatccctgagcgttaaagtagcagtcctggatacagggatcgaccataatcacccatccttggccaacttcgtgaatactaatcttggccgctcgtttgttggaggaaacaccatggatgttcaaggtcatggcacacatgttgctggcacgattgcatcttatggggtcgtaagcggagtgatgcagcaggcgacactgatcccggtcaaagtgctcgataattctggcagcgggtccctttacggtattacgcagggcatattgtatgccgccgacatcgatgcagacgtcattaacatgtctctgggtggagggggctataatcagggcatggatgaggctactcaaacagcagttgctcagggaaccattgtagtagcagcgactggcaatgatggtgcatcgtcgatcagttatcctgctgcctacagcagcgtcattgcggtgggatctgtggaccaaaatcgtgttcgatcctcgttttctaactatggatctgggcttgaactgatggcaccgggcagcaacatctacagtacgtatcctaatggcagatatcgcacgttgagtggtacaagcatggctactccgcacgttgcgggcgtagctgggctcattcgcgcagccaacccagacatagtggtcgcgcaagcccgtcagattctgcgggataccgcgcaagaagcaggatcgttcacacagtacggctatggaatcgtcgatgctcatgccgccgttgttgctgcatccggtggttcgggcggc

SEQ ID NO: 1588 - protein, 413 aa, synthetic construct
  REGION 1..413: note = Variant of serine peptidase from Bacillus sinesaloumensis
MADQASQANGNQDVIEGELIVSVEPKNGKPDVSIQSAQSVTGQEDVLKSKGFTIVDTLHVEDSSVKPLVSKNFNKKVVEKMGLVYLVQYSPDQFKSSNIAKKELRKELMDLGFKVRYISENYKMMAIEGTATLQGVHPCQVWAYNMIKAPEAWAITGGSLSVKVAVLDTGIDHNHPSLANFVNTNLGRSFVGGNTMDVQGHGTHVAGTIASYGVVSGVMQQATLIPVKVLDNSGSGSLYGITQGILYAADIDADVINMSLGGGGYNQGMDEATQTAVAQGTIVVAATGNDGASSISYPAAYSSVIAVGSVDQNRVRSSFSNYGSGLELMAPGSNIYSTYPNGRYRTLSGTSMATPHVAGVAGLIRAANPDIVVAQARQILRDTAQEAGSFTQYGYGIVDAHAAVVAASGGSGG

SEQ ID NO: 1589 - DNA, 1239 bp, synthetic construct
  misc_feature 1..1239: note = Variant of serine peptidase from Bacillus sinesaloumensis
  source 1..1239: mol_type = other DNA
atggcagatcaagctagtcaagctaatggaaaccaggacgtcattgaaggcgagctgatcgtttcagtggaaccgaagaacggtaaacctgatgtgagcattcaaagtgcacaatccgtaacagggcaggaagacgtccttaaatcgaaaggctttacgatcgttgataccttgcatgtagaggatagcagcgtcaagccactcgtctcgaagaatttcaataagaaagtggtggagaagatgggactggtgtatcttgttcaatactctccggaccagtttaaaagttccaacattgcgaagaaagaactcagaaaagaattgatggatctgggctttaaagtccgctatataagcgaaaattacaagatgatggcgatcgaaggtacagccactcttcagggggtgaatccttgtcaagtttgggcgtataatatgattaaagctccggaagcgtgggctattacgggcggatccctgagcgttaaagtagcagtcctggatacagggatcgaccataatcacccatccttggccaacttcgtgaatactaatcttggccgctcgtttgttggaggaaacaccatggatgttcaaggtcatggcacacatgttgctggcacgattgcatcttatgggagtgtaagcggagtgatgcagcaggcgacactgatcccggtcaaagtgctcgataattctggcagcgggtccctttacggtattacgcagggcatattgtatgccgccgacatcgatgcagacgtcattaacatgtctctgggtggaggaggctataatcagggcatggatgaggctactcaaacagcagttgctcagggaaccattgtagtagcagcgactggcaatgatggtgcatcgtcgatcagttatcctgctgcctacagcagcgtcattgcggtgggatctgtggaccaaaatcgtgttcgatcctcgttttctaactatggatctgggcttgaactgatggcaccgggcagcaacatctacagtacgtatcctaatggcagatatcgcacgttgagtggtacaagcatggctactccgcacgttgcgggcgtagctgggctcattcgcgcagccaacccagacatagtggtcgcgcaagcccgtcagattctgcgggataccgcgcaagaagcaggatcgttcacacagtacggctatggaatcgtcgatgctcatgccgccgttgttgctgcatccggtggttcgggcgac

SEQ ID NO: 1590 - protein, 413 aa, synthetic construct
  REGION 1..413: note = Variant of serine peptidase from Bacillus sinesaloumensis
MADQASQANGNQDVIEGELIVSVEPKNGKPDVSIQSAQSVTGQEDVLKSKGFTIVDTLHVEDSSVKPLVSKNFNKKVVEKMGLVYLVQYSPDQFKSSNIAKKELRKELMDLGFKVRYISENYKMMAIEGTATLQGVNPCQVWAYNMIKAPEAWAITGGSLSVKVAVLDTGIDHNHPSLANFVNTNLGRSFVGGNTMDVQGHGTHVAGTIASYGSVSGVMQQATLIPVKVLDNSGSGSLYGITQGILYAADIDADVINMSLGGGGYNQGMDEATQTAVAQGTIVVAATGNDGASSISYPAAYSSVIAVGSVDQNRVRSSFSNYGSGLELMAPGSNIYSTYPNGRYRTLSGTSMATPHVAGVAGLIRAANPDIVVAQARQILRDTAQEAGSFTQYGYGIVDAHAAVVAASGGSGD

SEQ ID NO: 1591 - DNA, 1239 bp, synthetic construct
  misc_feature 1..1239: note = Variant of serine peptidase from Bacillus sinesaloumensis
  source 1..1239: mol_type = other DNA
atggcagatcaagctagtcaagctaatggaaaccaggacgtcattgaaggcgagctgatcgtttcagtggaaccgaagaacggtaaacctgatgtgagcattcaaagtgcacaatccgtaacagggcaggaagacgtccttaaatcgaaaggctttacgatcgttgataccttgcatgtagaggatagcagcgtcaagccactcgtctcgaagaatttcaataagaaagtggtggagaagatgggactggtgtatcttgttcaatactctccggaccagtttaaaagttccaacattgcgaagaaagaactcagaaaagaattgatggatctgggctttaaagtccgctatataagcgaaaattacaagatgatggcgatcgaaggtacagccactcttcagggggtggctcctctgcaagtttgggcgtataatatgattaaagctccggaagcgtgggctattacgggcggatccctgagcgttaaagtagcagtcctggatacagggatcgaccataatcacccatccttggccaacttcgtgaatactaatcttggccgctcgtttgttggaggaaacaccatggatgttcaaggtcatggcacacatgttgctggcacgattgcatcttatgggagtgtaagcggagtgatgcagcaggcgacactgatcccggtcaaagtgctcgataatctgggcagcgggtccctttacggtattacgcagggcatattgtatgccgccgacatcgatgcagacgtcattaacatgtctctgggtggaggaggctataatcagggcatggatgaggctactcaaacagcagttgctatgggaaccattgtagtagcagcgactggcaatgatggtgcatcgtcgatcagttatcctgctgcctacagcagcgtcattgcggtgggatctgtggaccagaatcgtgttcgatcctcgttttctaactatggatctgggcttgaactgatggcaccgggcagcaacatctacagtacgtatcctaatggcagatatcgcacgttgagtggtacaagcatggctactccgcacgttgcgggcgtagctgggctcattcgcgcagccaacccagacatagtggtcgcgcaagcccgtcagattctgcgggataccgcgcaagaagcaggatcgttcacacagtacggctatggaatcgtcgatgctcatgccgccgttgttgctgcatccggtggttcgggcggc

SEQ ID NO: 1592 - protein, 413 aa, synthetic construct
  REGION 1..413: note = Variant of serine peptidase from Bacillus sinesaloumensis
MADQASQANGNQDVIEGELIVSVEPKNGKPDVSIQSAQSVTGQEDVLKSKGFTIVDTLHVEDSSVKPLVSKNFNKKVVEKMGLVYLVQYSPDQFKSSNIAKKELRKELMDLGFKVRYISENYKMMAIEGTATLQGVAPLQVWAYNMIKAPEAWAITGGSLSVKVAVLDTGIDHNHPSLANFVNTNLGRSFVGGNTMDVQGHGTHVAGTIASYGSVSGVMQQATLIPVKVLDNLGSGSLYGITQGILYAADIDADVINMSLGGGGYNQGMDEATQTAVAMGTIVVAATGNDGASSISYPAAYSSVIAVGSVDQNRVRSSFSNYGSGLELMAPGSNIYSTYPNGRYRTLSGTSMATPHVAGVAGLIRAANPDIVVAQARQILRDTAQEAGSFTQYGYGIVDAHAAVVAASGGSGG

SEQ ID NO: 1593 - DNA, 1239 bp, synthetic construct
  misc_feature 1..1239: note = Variant of serine peptidase from Bacillus sinesaloumensis
  source 1..1239: mol_type = other DNA
atggcagatcaagctagtcaagctaatggaaaccaggacgtcattgaaggcgagctgatcgtttcagtggaaccgaagaacggtaaacctgatgtgagcattcaaagtgcacaatccgtaacagggcaggaagacgtccttaaatcgaaaggctttacgatcgttgataccttgcatgtagaggatagcagcgtcaagccactcgtctcgaagaatttcaataagaaagtggtggagaagatgggactggtgtatcttgttcaatactctccggaccagtttaaaagttccaacattgcgaagaaagaactcagaaaagaattgatggatctgggctttaaagtccgctatataagcgaaaattacaagatgatggcgatcgaaggtacagccactcttcagggggtgcatccttgtcaagtttgggcgtataatatgattaaagctccggaagcgtgggctattacgggcggatccctgagcgttaaagtagcagtcctggatacagggatcgaccataatcacccatccttggccaacttcgtgaatactaatcttggccgctcgtttgttggaggaaacaccatggatgttcaaggtcatggcacacatgttgctggcacgattgcatcttatggggtcgtaagcggagtgatgcagagtgcgacactgatcccggtcaaagtgctcgataattctggcagcgggtccctttacggtattacgcagggcatattgtatgccgccgacatcgatgcagacgtcattaacatgtctctgggtggaggaggctataatcagggcatggatgaggctactcaaacagcagttgctcagggaaccattgtagtagcagcgactggcaatgatggtgcatcgtcgatcagttatcctgctgcctacagcagcgtcattgcggtgggatctgtggaccaaaatcgtgttcgatcctcgttttctaactatggatctgggcttgaactgatggcaccgggcagcaacatctacagtacgtatcctaatggcagatatcgcacgttgagtggtacaagcatggctactccgcacgttgcgggcgtagctgggctcattcgcgcagccaacccagacatagtggtcgcgcaagcccgtcagattctgcgggataccgcgcaagaagcaggatcgttcacacagtacggctatggaatcgtcgatgctcatgccgccgttgttgctgcatccggtggttcgggcggc

SEQ ID NO: 1594 - protein, 413 aa, synthetic construct
  REGION 1..413: note = Variant of serine peptidase from Bacillus sinesaloumensis
MADQASQANGNQDVIEGELIVSVEPKNGKPDVSIQSAQSVTGQEDVLKSKGFTIVDTLHVEDSSVKPLVSKNFNKKVVEKMGLVYLVQYSPDQFKSSNIAKKELRKELMDLGFKVRYISENYKMMAIEGTATLQGVHPCQVWAYNMIKAPEAWAITGGSLSVKVAVLDTGIDHNHPSLANFVNTNLGRSFVGGNTMDVQGHGTHVAGTIASYGVVSGVMQSATLIPVKVLDNSGSGSLYGITQGILYAADIDADVINMSLGGGGYNQGMDEATQTAVAQGTIVVAATGNDGASSISYPAAYSSVIAVGSVDQNRVRSSFSNYGSGLELMAPGSNIYSTYPNGRYRTLSGTSMATPHVAGVAGLIRAANPDIVVAQARQILRDTAQEAGSFTQYGYGIVDAHAAVVAASGGSGG

SEQ ID NO: 1595 - DNA, 1239 bp, synthetic construct
  misc_feature 1..1239: note = Variant of serine peptidase from Bacillus sinesaloumensis
  source 1..1239: mol_type = other DNA
atggcagatcaagctagtcaagctaatggaaaccaggacgtcattgaaggcgagctgatcgtttcagtggaaccgaagaacggtaaacctgatgtgagcattcaaagtgcacaatccgtaacagggcaggaagacgtccttaaatcgaaaggctttacgatcgttgataccttgcatgtagaggatagcagcgtcaagccactcgtctcgaagaatttcaataagaaagtggtggagaagatgggactggtgtatcttgttcaatactctccggaccagtttaaaagttccaacattgcgaagaaagaactcagaaaagaattgatggatctgggctttaaagtccgctatataagcgaaaattacaagatgatggcgatcgaaggtacagccactcttcagggggtggctcctctgcaagtttgggcgtataatatgattaaagctccggaagcgtgggctattacgggcggatccctgagcgttaaagtagcagtcctggatacagggatcgaccataatcacccatccttggccaacttcgtgaatactaatcttggccgctcgtttgttggaggaaacaccatggatgttcaaggtcatggcacacatgttgctggcacgattgcatcttatgggagtgtaagcggagtgatgcagtcggcgacactgatcccggtcaaagtgctcgataattctggcagcgggtccctttacggtattacgcagggcatattgtatgccgccgacatcgatgcagacgtcattaacatgtctctgggtggaggaggctataatcagggcatggatgaggctactcaaacagcagttgctcagggaaccattgtagtagcagcgactggcaatgatggtgcatcgtcgatcagttatcctgctgcctacagcagcgtcattgcggtgggatctgtggaccaaaatcgtgttcgatcctcgttttctaactatggatctgggcttgaactgatggcaccgggcagcaacatctacagtacgtatcctaatggcagatatcgcacgttgagtggtacaagcatggctactccgcacgttgcgggcgtagctgggctcattcgcgcagccaacccagacatagtggtcgcgcaagcccgtcagattctgcgggataccgcgcaagaagcaggatcgttcacacagtacggctatggaatcgtcgatgctcatgccgccgttgttgctgcatccggtggttcgggcggc

SEQ ID NO: 1596 - protein, 413 aa, synthetic construct
  REGION 1..413: note = Variant of serine peptidase from Bacillus sinesaloumensis
MADQASQANGNQDVIEGELIVSVEPKNGKPDVSIQSAQSVTGQEDVLKSKGFTIVDTLHVEDSSVKPLVSKNFNKKVVEKMGLVYLVQYSPDQFKSSNIAKKELRKELMDLGFKVRYISENYKMMAIEGTATLQGVAPLQVWAYNMIKAPEAWAITGGSLSVKVAVLDTGIDHNHPSLANFVNTNLGRSFVGGNTMDVQGHGTHVAGTIASYGSVSGVMQSATLIPVKVLDNSGSGSLYGITQGILYAADIDADVINMSLGGGGYNQGMDEATQTAVAQGTIVVAATGNDGASSISYPAAYSSVIAVGSVDQNRVRSSFSNYGSGLELMAPGSNIYSTYPNGRYRTLSGTSMATPHVAGVAGLIRAANPDIVVAQARQILRDTAQEAGSFTQYGYGIVDAHAAVVAASGGSGG

SEQ ID NO: 1597 - DNA, 1239 bp, synthetic construct
  misc_feature 1..1239: note = Variant of serine peptidase from Bacillus sinesaloumensis
  source 1..1239: mol_type = other DNA
atggcagatcaagctagtcaagctaatggaaaccaggacgtcattgaaggcgagctgatcgtttcagtggaaccgaagaacggtaaacctgatgtgagcattcaaagtgcacaatccgtaacagggcaggaagacgtccttaaatcgaaaggctttacgatcgttgataccttgcatgtagaggatagcagcgtcaagccactcgtctcgaagaatttcaataagaaagtggtggagaagatgggactggtgtatcttgttcaatactctccggaccagtttaaaagttccaacattgcgaagaaagaactcagaaaagaattgatggatctgggctttaaagtccgctatataagcgaaaattacaagatgatggcgatcgaaggtacagccactcttcagggggtgaatccttgtcaagtttgggcgtataatatgattaaagctccggaagcgtgggctattacgggcggatccctgagcgttaaagtagcagtcctggatacagggatcgaccataatcacccatccttggccaacttcgtgaatactaatcttggccgctcgtttgttggaggaaacaccatggatgttcaaggtcatggcacacatgttgctggcacgattgcatcttatgggagtgtaagcggagtgatgcagagtgcgacactgatcccggtcaaagtgctcgataatctgggcagcgggtccctttacggtattacgcagggcatattgtatgccgccgacatcgatgcagacgtcattaacatgtctctgggtggaggaggctataatcagggcatggatgaggctactcaaacagcagttgctcagggaaccattgtagtagcagcgactggcaatgatggtgcatcgtcgatcagttatcctgctgcctacagcagcgtcattgcggtgggatctgtggaccaaaatcgtgttcgatcctcgttttctaactatggatctgggcttgaactgatggcaccgggcagcaacatctacagtacgtatcctaatggcagatatcgcacgttgagtggtacaagcatggctactccgcacgttgcgggcgtagctgggctcattcgcgcagccaacccagacatagtggtcgcgcaagcccgtcagattctgcgggataccgcgcaagaagcaggatcgttcacacagtacggctatggaatcgtcgatgctcatgccgccgttgttgctgcatccggtggttcgggcggc

SEQ ID NO: 1598 - protein, 413 aa, synthetic construct
  REGION 1..413: note = Variant of serine peptidase from Bacillus sinesaloumensis
MADQASQANGNQDVIEGELIVSVEPKNGKPDVSIQSAQSVTGQEDVLKSKGFTIVDTLHVEDSSVKPLVSKNFNKKVVEKMGLVYLVQYSPDQFKSSNIAKKELRKELMDLGFKVRYISENYKMMAIEGTATLQGVNPCQVWAYNMIKAPEAWAITGGSLSVKVAVLDTGIDHNHPSLANFVNTNLGRSFVGGNTMDVQGHGTHVAGTIASYGSVSGVMQSATLIPVKVLDNLGSGSLYGITQGILYAADIDADVINMSLGGGGYNQGMDEATQTAVAQGTIVVAATGNDGASSISYPAAYSSVIAVGSVDQNRVRSSFSNYGSGLELMAPGSNIYSTYPNGRYRTLSGTSMATPHVAGVAGLIRAANPDIVVAQARQILRDTAQEAGSFTQYGYGIVDAHAAVVAASGGSGG

SEQ ID NO: 1599 - DNA, 1239 bp, synthetic construct
  misc_feature 1..1239: note = Variant of serine peptidase from Bacillus sinesaloumensis
  source 1..1239: mol_type = other DNA
atggcagatcaagctagtcaagctaatggaaaccaggacgtcattgaaggcgagctgatcgtttcagtggaaccgaagaacggtaaacctgatgtgagcattcaaagtgcacaatccgtaacagggcaggaagacgtccttaaatcgaaaggctttacgatcgttgataccttgcatgtagaggatagcagcgtcaagccactcgtctcgaagaatttcaataagaaagtggtggagaagatgggactggtgtatcttgttcaatactctccggaccagtttaaaagttccaacattgcgaagaaagaactcagaaaagaattgatggatctgggctttaaagtccgctatataagcgaaaattacaagatgatggcgatcgaaggtacagccactcttcagggggtggctccttgtcaagtttgggcgtataatatgattaaagctccggaagcgtgggctattacgggcggatccctgagcgttaaagtagcagtcctggatacagggatcgaccataatcacccatccttggccaacttcgtgaatactaatcttggccgctcgtttgttggaggaaacaccatggatgttcaaggtcatggcacacatgttgctggcacgattgcatcttatgggagtgtaagcggagtgatgcagagtgcgacactgatcccggtcaaagtgctcgataattctggcagcgggtccctttacggtattacgcagggcatattgtatgccgccgacatcgatgcagacgtcattaacatgtctctgggtggaggaggctataatcagggcatggatgaggctactcaaacagcagttgctcagggaaccattgtagtagcagcgactggcaatgatggtgcatcgtcgatcagttatcctgctgcctacagcagcgtcattgcggtgggatctgtggaccagaatcgtgttcgatcctcgttttctaactatggatctgggcttgaactgatggcaccgggcagcaacatctacagtacgtatcctaatggcagatatcgcacgttgagtggtacaagcatggctactccgcacgttgcgggcgtagctgggctcattcgcgcagccaacccagacatagtggtcgcgcaagcccgtcagattctgcgggataccgcgcaagaagcaggatcgttcacacagtacggctatggaatcgtcgatgctcatgccgccgttgttgctgcatccggtggttcgggcggc

SEQ ID NO: 1600 - protein, 413 aa, synthetic construct
  REGION 1..413: note = Variant of serine peptidase from Bacillus sinesaloumensis
MADQASQANGNQDVIEGELIVSVEPKNGKPDVSIQSAQSVTGQEDVLKSKGFTIVDTLHVEDSSVKPLVSKNFNKKVVEKMGLVYLVQYSPDQFKSSNIAKKELRKELMDLGFKVRYISENYKMMAIEGTATLQGVAPCQVWAYNMIKAPEAWAITGGSLSVKVAVLDTGIDHNHPSLANFVNTNLGRSFVGGNTMDVQGHGTHVAGTIASYGSVSGVMQSATLIPVKVLDNSGSGSLYGITQGILYAADIDADVINMSLGGGGYNQGMDEATQTAVAQGTIVVAATGNDGASSISYPAAYSSVIAVGSVDQNRVRSSFSNYGSGLELMAPGSNIYSTYPNGRYRTLSGTSMATPHVAGVAGLIRAANPDIVVAQARQILRDTAQEAGSFTQYGYGIVDAHAAVVAASGGSGG

SEQ ID NO: 1601 - DNA, 1239 bp, synthetic construct
  misc_feature 1..1239: note = Variant of serine peptidase from Bacillus sinesaloumensis
  source 1..1239: mol_type = other DNA
atggcagatcaagctagtcaagctaatggaaaccaggacgtcattgaaggcgagctgatcgtttcagtggaaccgaagaacggtaaacctgatgtgagcattcaaagtgcacaatccgtaacagggcaggaagacgtccttaaatcgaaaggctttacgatcgttgataccttgcatgtagaggatagcagcgtcaagccactcgtctcgaagaatttcaataagaaagtggtggagaagatgggactggtgtatcttgttcaatactctccggaccagtttaaaagttccaacattgcgaagaaagaactcagaaaagaattgatggatctgggctttaaagtccgctatataagcgaaaattacaagatgatggcgatcgaaggtacagccactcttcagggggtgaatccttgtcaagtttgggcgtataatatgattaaagctccggaagcgtgggctattacgggcggatccctgagcgttaaagtagcagtcctggatacagggatcgaccataatcacccatccttggccaacttcgtgaatactaatcttggccgctcgtttgttggaggaaacaccatggatgttcaaggtcatggcacacatgttgctggcacgattgcatcttatgggagtgtaagcggagtgatgcagagtgcgacactgatcccggtcaaagtgctcgataattctggcagcgggtccctttacggtattacgcagggcatattgtatgccgccgacatcgatgcagacgtcattaacatgtctctgggtggaggaggctataatcagggcatggatgaggctactcaaacagcagttgctcagggaaccattgtagtagcagcgactggcaatgatggtgcatcgtcgatcagttatcctgctgcctacagcagcgtcattgcggtgggatctgtggaccaaaatcgtgttcgatcctcgttttctaactatggatctgggcttgaactgatggcaccgggcagcaacatctacagtacgtatcctaatggcagatatcgcacgttgagtggtacaagcatggctactccgcacgttgcgggcgtagctgggctcattcgcgcagccaacccagacatagtggtcgcgcaagcccgtcagattctgcgggataccgcgcaagaagcaggatcgttcacacagtacggctatggaatcgtcgatgctcatgccgccgttgttgctgcatccggtggttcgggcgac

SEQ ID NO: 1602 - protein, 413 aa, synthetic construct
  REGION 1..413: note = Variant of serine peptidase from Bacillus sinesaloumensis
MADQASQANGNQDVIEGELIVSVEPKNGKPDVSIQSAQSVTGQEDVLKSKGFTIVDTLHVEDSSVKPLVSKNFNKKVVEKMGLVYLVQYSPDQFKSSNIAKKELRKELMDLGFKVRYISENYKMMAIEGTATLQGVNPCQVWAYNMIKAPEAWAITGGSLSVKVAVLDTGIDHNHPSLANFVNTNLGRSFVGGNTMDVQGHGTHVAGTIASYGSVSGVMQSATLIPVKVLDNSGSGSLYGITQGILYAADIDADVINMSLGGGGYNQGMDEATQTAVAQGTIVVAATGNDGASSISYPAAYSSVIAVGSVDQNRVRSSFSNYGSGLELMAPGSNIYSTYPNGRYRTLSGTSMATPHVAGVAGLIRAANPDIVVAQARQILRDTAQEAGSFTQYGYGIVDAHAAVVAASGGSGD

SEQ ID NO: 1603 - DNA, 1239 bp, synthetic construct
  misc_feature 1..1239: note = Variant of serine peptidase from Bacillus sinesaloumensis
  source 1..1239: mol_type = other DNA
atggcagatcaagctagtcaagctaatggaaaccaggacgtcattgaaggcgagctgatcgtttcagtggaaccgaagaacggtaaacctgatgtgagcattcaaagtgcacaatccgtaacagggcaggaagacgtccttaaatcgaaaggctttacgatcgttgataccttgcatgtagaggatagcagcgtcaagccactcgtctcgaagaatttcaataagaaagtggtggagaagatgggactggtgtatcttgttcaatactctccggaccagtttaaaagttccaacattgcgaagaaagaactcagaaaagaattgatggatctgggctttaaagtccgctatataagcgaaaattacaagatgatggcgatcgaaggtacagccactcttcagggggtgaatccttgtcaagtttgggcgtataatatgattaaagctccggaagcgtgggctattacgggcggatccctgagcgttaaagtagcagtcctggatacagggatcgaccataatcacccatccttggccaacttcgtgaatactaatcttggccgctcgtttgttggaggaaacaccatggatgttcaaggtcatggcacacatgttgctggcacgattgcatcttatgggagtgtaagcggagtgatgcagcaggcgacactgatcccggtcaaagtgctcgataatagcggcagcgggtccctttacggtattacgcagggcatattgtatgccgccgacatcgatgcagacgtcattaacatgtctctgggtggagggggctataatcagggcatggatgaggctactcaaacagcagttgctaagggaaccattgtagtagcagcgactggcaatgatggtgcatcgtcgatcagttatcctgctgcctacagcagcgtcattgcggtgggatctgtggaccaaaatcgtgttcgatcctcgttttctaactatggatctgggcttgaactgatggcaccgggcagcaacatctacagtacgtatcctaatggcagatatcgcacgttgagtggtacaagcatggctactccgcacgttgcgggcgtagctgggctcattcgcgcagccaacccagacatagtggtcgcgcaagcccgtcagattctgcgggataccgcgcaagaagcaggatcgttcacacagtacggctatggaatcgtcgatgctcatgccgccgttgttgctgcatccggtggttcgggcggc

SEQ ID NO: 1604 - protein, 413 aa, synthetic construct
  REGION 1..413: note = Variant of serine peptidase from Bacillus sinesaloumensis
MADQASQANGNQDVIEGELIVSVEPKNGKPDVSIQSAQSVTGQEDVLKSKGFTIVDTLHVEDSSVKPLVSKNFNKKVVEKMGLVYLVQYSPDQFKSSNIAKKELRKELMDLGFKVRYISENYKMMAIEGTATLQGVNPCQVWAYNMIKAPEAWAITGGSLSVKVAVLDTGIDHNHPSLANFVNTNLGRSFVGGNTMDVQGHGTHVAGTIASYGSVSGVMQQATLIPVKVLDNSGSGSLYGITQGILYAADIDADVINMSLGGGGYNQGMDEATQTAVAKGTIVVAATGNDGASSISYPAAYSSVIAVGSVDQNRVRSSFSNYGSGLELMAPGSNIYSTYPNGRYRTLSGTSMATPHVAGVAGLIRAANPDIVVAQARQILRDTAQEAGSFTQYGYGIVDAHAAVVAASGGSGG

SEQ ID NO: 1605 - DNA, 1239 bp, synthetic construct
  misc_feature 1..1239: note = Variant of serine peptidase from Bacillus sinesaloumensis
  source 1..1239: mol_type = other DNA
atggcagatcaagctagtcaagctaatggaaaccaggacgtcattgaaggcgagctgatcgtttcagtggaaccgaagaacggtaaacctgatgtgagcattcaaagtgcacaatccgtaacagggcaggaagacgtccttaaatcgaaaggctttacgatcgttgataccttgcatgtagaggatagcagcgtcaagccactcgtctcgaagaatttcaataagaaagtggtggagaagatgggactggtgtatcttgttcaatactctccggaccagtttaaaagttccaacattgcgaagaaagaactcagaaaagaattgatggatctgggctttaaagtccgctatataagcgaaaattacaagatgatggcgatcgaaggtacagccactcttcagggggtgaatcctaatcaagtttgggcgtataatatgattaaagctccggaagcgtgggctattgttggcggatccctgagcgttaaagtagcagtcctggatacagggatcgaccataatcacccatccttggccaacttcgtgaatactaatcttggccgctcgtttgttggaggaaacaccatggatgttcaaggtcatggcacacatgttgctggcacgattgcatcttatggggtcgtaagcggagtgatgcagagtgcgacactgatcccggtcaaagtgctcgataatctgggcagcgggtccctttacggtattacgcagggcatattgtatgccgccgacatcgatgcagacgtcattaacatgtctctgggtggagggggctataatcagggcatggatgaggctactcaaacagcagttgctcagggaaccattgtagtagcagcgactggcaatgatggtgcatcgtcgatcagttatcctgctgcctacagcagcgtcattgcggtgggatctgtggaccagaatcgtgttcgatcctcgttttctaactatggatctgggcttgaactgatggcaccgggcagcaacatctacagtacgtatcctaatggcagatatcgcacgttgagtggtacaagcatggctactccgcacgttgcgggcgtagctgggctcattcgcgcagccaacccagacatagtggtcgcgcaagcccgtcagattctgcgggataccgcgcaagaagcaggatcgttcacacagtacggctatggaatcgtcgatgctcatgccgccgttgttgctgcatccggtggttcgggcgac

SEQ ID NO: 1606 - protein, 413 aa, synthetic construct
  REGION 1..413: note = Variant of serine peptidase from Bacillus sinesaloumensis
MADQASQANGNQDVIEGELIVSVEPKNGKPDVSIQSAQSVTGQEDVLKSKGFTIVDTLHVEDSSVKPLVSKNFNKKVVEKMGLVYLVQYSPDQFKSSNIAKKELRKELMDLGFKVRYISENYKMMAIEGTATLQGVNPNQVWAYNMIKAPEAWAIVGGSLSVKVAVLDTGIDHNHPSLANFVNTNLGRSFVGGNTMDVQGHGTHVAGTIASYGVVSGVMQSATLIPVKVLDNLGSGSLYGITQGILYAADIDADVINMSLGGGGYNQGMDEATQTAVAQGTIVVAATGNDGASSISYPAAYSSVIAVGSVDQNRVRSSFSNYGSGLELMAPGSNIYSTYPNGRYRTLSGTSMATPHVAGVAGLIRAANPDIVVAQARQILRDTAQEAGSFTQYGYGIVDAHAAVVAASGGSGD

SEQ ID NO: 1607 - DNA, 1239 bp, synthetic construct
  misc_feature 1..1239: note = Variant of serine peptidase from Bacillus sinesaloumensis
  source 1..1239: mol_type = other DNA
atggcagatcaagctagtcaagctaatggaaaccaggacgtcattgaaggcgagctgatcgtttcagtggaaccgaagaacggtaaacctgatgtgagcattcaaagtgcacaatccgtaacagggcaggaagacgtccttaaatcgaaaggctttacgatcgttgataccttgcatgtagaggatagcagcgtcaagccactcgtctcgaagaatttcaataagaaagtggtggagaagatgggactggtgtatcttgttcaatactctccggaccagtttaaaagttccaacattgcgaagaaagaactcagaaaagaattgatggatctgggctttaaagtccgctatataagcgaaaattacaagatgatggcgatcgaaggtacagccactcttcagggggtgaatcctctgcaagtttgggcgtataatatgattaaagctccggaagcgtgggctattgttggcggatccctgagcgttaaagtagcagtcctggatacagggatcgaccataatcacccatccttggccaacttcgtgaatactaatcttggccgctcgtttgttggaggaaacaccatggatgttcaaggtcatggcacacatgttgctggcacgattgcatcttatggggtcgtaagcggagtgatgcagagtgcgacactgatcccggtcaaagtgctcgataatagcggcagcgggtccctttacggtattacgcagggcatattgtatgccgccgacatcgatgcagacgtcattaacatgtctctgggtggaggaggctataatcagggcatggatgaggctactcaaacagcagttgctcagggaaccattgtagtagcagcgactggcaatgatggtgcatcgtcgatcagttatcctgctgcctacagcagcgtcattgcggtgggatctgtggaccagaatcgtgttcgatcctcgttttctaactatggatctgggcttgaactgatggcaccgggcagcaacatctacagtacgtatcctaatggcagatatcgcacgttgagtggtacaagcatggctactccgcacgttgcgggcgtagctgggctcattcgcgcagccaacccagacatagtggtcgcgcaagcccgtcagattctgcgggataccgcgcaagaagcaggatcgttcacacagtacggctatggaatcgtcgatgctcatgccgccgttgttgctgcatccggtggttcgggcggc

SEQ ID NO: 1608 - protein, 413 aa, synthetic construct
  REGION 1..413: note = Variant of serine peptidase from Bacillus sinesaloumensis
MADQASQANGNQDVIEGELIVSVEPKNGKPDVSIQSAQSVTGQEDVLKSKGFTIVDTLHVEDSSVKPLVSKNFNKKVVEKMGLVYLVQYSPDQFKSSNIAKKELRKELMDLGFKVRYISENYKMMAIEGTATLQGVNPLQVWAYNMIKAPEAWAIVGGSLSVKVAVLDTGIDHNHPSLANFVNTNLGRSFVGGNTMDVQGHGTHVAGTIASYGVVSGVMQSATLIPVKVLDNSGSGSLYGITQGILYAADIDADVINMSLGGGGYNQGMDEATQTAVAQGTIVVAATGNDGASSISYPAAYSSVIAVGSVDQNRVRSSFSNYGSGLELMAPGSNIYSTYPNGRYRTLSGTSMATPHVAGVAGLIRAANPDIVVAQARQILRDTAQEAGSFTQYGYGIVDAHAAVVAASGGSGG

SEQ ID NO: 1609 - DNA, 1239 bp, synthetic construct
  misc_feature 1..1239: note = Variant of serine peptidase from Bacillus sinesaloumensis
  source 1..1239: mol_type = other DNA
atggcagatcaagctagtcaagctaatggaaaccaggacgtcattgaaggcgagctgatcgtttcagtggaaccgaagaacggtaaacctgatgtgagcattcaaagtgcacaatccgtaacagggcaggaagacgtccttaaatcgaaaggctttacgatcgttgataccttgcatgtagaggatagcagcgtcaagccactcgtctcgaagaatttcaataagaaagtggtggagaagatgggactggtgtatcttgttcaatactctccggaccagtttaaaagttccaacattgcgaagaaagaactcagaaaagaattgatggatctgggctttaaagtccgctatataagcgaaaattacaagatgatggcgatcgaaggtacagccactcttcagggggtgaatcctctgcaagtttgggcgtatgaaatgattaaagctccggaagcgtgggctattacgggcggatccctgagcgttaaagtagcagtcctggataccgggatcgaccataatcacccatccttggccaacttcgtgaatactaatcttggccgctcgtttgttggaggaaacaccatggatgttcaaggtcatggcacacatgttgctggcacgattgcatcttatgggccggtaagcggagtgatgcagtcggcgacactgatcccggtcaaagtgctcgataattctggcagcgggtccctttacggtattacgcagggcatattgtatgccgccgacatcgatgcagacgtcattaacatgtctctgggtggaggaggctataatcagggcatggatgaggctctgcaaacagcagttgctatgggaaccattgtagtagcagcgactggcaatgatggtgcatcgtcgatcagttatcctgctgcctacagcagcgtcattgcggtgggatctgtggaccaaaatcgtgttcgatcctcgttttctaactatggatctgggcttgaactgatggcaccgggcagcaacatctacagtacgtatcctaatggcagatatcgcacgttgagtggtacaagcatggctactccgcacgttgcgggcgtagctgggctcattcgcgcagccaacccagacataagtgtcgcgcaagcccgtcagattctgcgggataccgcgcaagaagcaggatcgttcacacagtacggctatggaatcgtcgatgctcatgccgccgttgttgctgcatccggtggttcgggcggc

SEQ ID NO: 1610 - protein, 413 aa, synthetic construct
  REGION 1..413: note = Variant of serine peptidase from Bacillus sinesaloumensis
MADQASQANGNQDVIEGELIVSVEPKNGKPDVSIQSAQSVTGQEDVLKSKGFTIVDTLHVEDSSVKPLVSKNFNKKVVEKMGLVYLVQYSPDQFKSSNIAKKELRKELMDLGFKVRYISENYKMMAIEGTATLQGVNPLQVWAYEMIKAPEAWAITGGSLSVKVAVLDTGIDHNHPSLANFVNTNLGRSFVGGNTMDVQGHGTHVAGTIASYGPVSGVMQSATLIPVKVLDNSGSGSLYGITQGILYAADIDADVINMSLGGGGYNQGMDEALQTAVAMGTIVVAATGNDGASSISYPAAYSSVIAVGSVDQNRVRSSFSNYGSGLELMAPGSNIYSTYPNGRYRTLSGTSMATPHVAGVAGLIRAANPDISVAQARQILRDTAQEAGSFTQYGYGIVDAHAAVVAASGGSGG

SEQ ID NO: 1611 - DNA, 1239 bp, synthetic construct
  misc_feature 1..1239: note = Variant of serine peptidase from Bacillus sinesaloumensis
  source 1..1239: mol_type = other DNA
atggcagatcaagctagtcaagctaatggaaaccaggacgtcattgaaggcgagctgatcgtttcagtggaaccgaagaacggtaaacctgatgtgagcattcaaagtgcacaatccgtaacagggcaggaagacgtccttaaatcgaaaggctttacgatcgttgataccttgcatgtagaggatagcagcgtcaagccactcgtctcgaagaatttcaataagaaagtggtggagaagatgggactggtgtatcttgttcaatactctccggaccagtttaaaagttccaacattgcgaagaaagaactcagaaaagaattgatggatctgggctttaaagtccgctatataagcgaaaattacaagatgatggcgatcgaaggtacagccactcttcagggggtgaatcctctgcaagtttgggcgtatgaaatgattaaagctccggaagcgtgggctattacgggcggatccctgagcgttaaagtagcagtcctggatacagggatcgaccataatcacccatccttggccaacttcgtgaatactaatcttggccgctcgtttgttggaggaaacaccatggatgttcaaggtcatggcacacatgttgctggcacgattgcatcttatgggccggtaagcggagtgatgcagagtgcgacactgatcccggtcaaagtgctcgataattctggcagcgggtccctttacggtattacgcagggcatattgtatgccgccgacatcgatgcagacgtcatgaacatgtctctgggtggaggaggctataatcagggcatggatgaggctctgcaaacagcagttgctatgggaaccattgtagtagcagcgactggcaatgatggtgcatcgtcgatcagttatcctgctgcctacagcagcgtcattgcggtgggatctgtggaccaaaatcgtgttcgatcctcgttttctaactatggatctgggcttgaactgatggcaccgggcagcaacatctacagtacgtatcctaatggcagatatcgcacgttgagtggtacaagcatggctactccgcacgttgcgggcgtagctgggctcattcgcgcagccaacccagacatagtggtcgcgcaagcccgtcagattctgcgggataccgcgcaagaagcaggatcgttcacacagtacggctatggaatcgtcgatgctcatgccgccgttgttgctgcatccggtggttcgggcggc

SEQ ID NO: 1612 - protein, 413 aa, synthetic construct
  REGION 1..413: note = Variant of serine peptidase from Bacillus sinesaloumensis
MADQASQANGNQDVIEGELIVSVEPKNGKPDVSIQSAQSVTGQEDVLKSKGFTIVDTLHVEDSSVKPLVSKNFNKKVVEKMGLVYLVQYSPDQFKSSNIAKKELRKELMDLGFKVRYISENYKMMAIEGTATLQGVNPLQVWAYEMIKAPEAWAITGGSLSVKVAVLDTGIDHNHPSLANFVNTNLGRSFVGGNTMDVQGHGTHVAGTIASYGPVSGVMQSATLIPVKVLDNSGSGSLYGITQGILYAADIDADVMNMSLGGGGYNQGMDEALQTAVAMGTIVVAATGNDGASSISYPAAYSSVIAVGSVDQNRVRSSFSNYGSGLELMAPGSNIYSTYPNGRYRTLSGTSMATPHVAGVAGLIRAANPDIVVAQARQILRDTAQEAGSFTQYGYGIVDAHAAVVAASGGSGG

SEQ ID NO: 1613 - DNA, 1239 bp, synthetic construct
  misc_feature 1..1239: note = Variant of serine peptidase from Bacillus sinesaloumensis
  source 1..1239: mol_type = other DNA
atggcagatcaagctagtcaagctaatggaaaccaggacgtcattgaaggcgagctgatcgtttcagtggaaccgaagaacggtaaacctgatgtgagcattcaaagtgcacaatccgtaacagggcaggaagacgtccttaaatcgaaaggctttacgatcgttgataccttgcatgtagaggatagcagcgtcaagccactcgtctcgaagaatttcaataagaaagtggtggagaagatgggactggtgtatcttgttcaatactctccggaccagtttaaaagttccaacattgcgaagaaagaactcagaaaagaattgatggatctgggctttaaagtccgctatataagcgaaaattacaagatgatggcgatcgaaggtacagccactcttcagggggtgaatcctctgcaagtttgggcgtataatatgattaaagctccggaagcgtgggctattacgggcggatccctgagcgttaaagtagcagtcctggataccgggatcgaccataatcacccatccttggccaacttcgtgaatactaatcttggccgctcgtttgttggaggaaacaccatggatgttcaaggtcatggcacacatgttgctggcacgattgcatcttatgggccggtaagcggagtgatgcagcaggcgacactgatcccggtcaaagtgctcgataattctggcagcgggtccctttacggtattacgctgggcatattgtatgccgccgacatcgatgcagacgtcatcaacatgtctctgggtggaggaggctataatcagggcatggatgaggctctgcaaacagcagttgctatgggaaccattgtagtagcagcgactggcaatgatggtgcatcgtcgatcagttatcctgctgcctacagcagcgtcattgcggtgggatctgtggaccaaaatcgtgttcgatcctcgttttctaactatggatctgggcttgaagtgatggcaccgggcagcaacatctacagtacgtatcctaatggcagatatcgcacgttgagtggtacaagcatggctactccgcacgttgcgggcgtagctgggctcattcgcgcagccaacccagacataagtgtcgcgcaagcccgtcagattctgcgggataccgcgcaagaagcaggatcgttcacacagtacggctatggaatcgtcgatgctcatgccgccgttgttgcggcatccggtggttcgggcggc

SEQ ID NO: 1614 - protein, 413 aa, synthetic construct
  REGION 1..413: note = Variant of serine peptidase from Bacillus sinesaloumensis
MADQASQANGNQDVIEGELIVSVEPKNGKPDVSIQSAQSVTGQEDVLKSKGFTIVDTLHVEDSSVKPLVSKNFNKKVVEKMGLVYLVQYSPDQFKSSNIAKKELRKELMDLGFKVRYISENYKMMAIEGTATLQGVNPLQVWAYNMIKAPEAWAITGGSLSVKVAVLDTGIDHNHPSLANFVNTNLGRSFVGGNTMDVQGHGTHVAGTIASYGPVSGVMQQATLIPVKVLDNSGSGSLYGITLGILYAADIDADVINMSLGGGGYNQGMDEALQTAVAMGTIVVAATGNDGASSISYPAAYSSVIAVGSVDQNRVRSSFSNYGSGLEVMAPGSNIYSTYPNGRYRTLSGTSMATPHVAGVAGLIRAANPDISVAQARQILRDTAQEAGSFTQYGYGIVDAHAAVVAASGGSGG

SEQ ID NO: 1615 - DNA, 1239 bp, synthetic construct
  misc_feature 1..1239: note = Variant of serine peptidase from Bacillus sinesaloumensis
  source 1..1239: mol_type = other DNA
atggcagatcaagctagtcaagctaatggaaaccaggacgtcattgaaggcgagctgatcgtttcagtggaaccgaagaacggtaaacctgatgtgagcattcaaagtgcacaatccgtaacagggcaggaagacgtccttaaatcgaaaggctttacgatcgttgataccttgcatgtagaggatagcagcgtcaagccactcgtctcgaagaatttcaataagaaagtggtggagaagatgggactggtgtatcttgttcaatactctccggaccagtttaaaagttccaacattgcgaagaaagaactcagaaaagaattgatggatctgggctttaaagtccgctatataagcgaaaattacaagatgatggcgatcgaaggtacagccactcttcagggggtgaatcctctgcaagtttgggcgtataatatgattaaagctccggaagcgtgggctattacgggcggatccctgagcgttaaagtagcagtcctggatacagggatcgaccataatcacccatccttggccaacttcgtgaatactaatcttggccgctcgtttgttggaggaaacaccatggatgttcaaggtcatggcacacatgttgctggcacgattgcatcttatgggccggtaagcggagtgatgcagagtgcgacactgatcccggtcaaagtgctcgataattctggcagcgggtccctttacggtattacgcagggcatattgtatgccgccgacatcgatgcagacgtcattaacatgtctctgggtggaggaggctataatcagggcatggatgaggctactcaaacagcagttgctatgggaaccattgtagtagcagcgactggcaatgatggtgcatcgtcgatcagttatcctgctgcctacagcagcgtcattgcggtgggatctgtggaccaaaatcgtgttcgatcctcgttttctaactatggatctgggcttgaactgatggcaccgggcagcaacatctacagtacgtatcctaatggcagatatcgcacgttgagtggtacaagcatggctactccgcacgttgcgggcgtagctgggctcattcgcgcagccaacccagacataagtgtcgcgcaagcccgtcagattctgcgggataccgcgcaagaagcaggatcgttcacacagtacggctatggaatcgtcgatgctcatgccgccgttgttgcggcatccggtggttcgggcggc

SEQ ID NO: 1616 - protein, 413 aa, synthetic construct
  REGION 1..413: note = Variant of serine peptidase from Bacillus sinesaloumensis
MADQASQANGNQDVIEGELIVSVEPKNGKPDVSIQSAQSVTGQEDVLKSKGFTIVDTLHVEDSSVKPLVSKNFNKKVVEKMGLVYLVQYSPDQFKSSNIAKKELRKELMDLGFKVRYISENYKMMAIEGTATLQGVNPLQVWAYNMIKAPEAWAITGGSLSVKVAVLDTGIDHNHPSLANFVNTNLGRSFVGGNTMDVQGHGTHVAGTIASYGPVSGVMQSATLIPVKVLDNSGSGSLYGITQGILYAADIDADVINMSLGGGGYNQGMDEATQTAVAMGTIVVAATGNDGASSISYPAAYSSVIAVGSVDQNRVRSSFSNYGSGLELMAPGSNIYSTYPNGRYRTLSGTSMATPHVAGVAGLIRAANPDISVAQARQILRDTAQEAGSFTQYGYGIVDAHAAVVAASGGSGG

SEQ ID NO: 1617 - DNA, 1239 bp, synthetic construct
  misc_feature 1..1239: note = Variant of serine peptidase from Bacillus sinesaloumensis
  source 1..1239: mol_type = other DNA
atggcagatcaagctagtcaagctaatggaaaccaggacgtcattgaaggcgagctgatcgtttcagtggaaccgaagaacggtaaacctgatgtgagcattcaaagtgcacaatccgtaacagggcaggaagacgtccttaaatcgaaaggctttacgatcgttgataccttgcatgtagaggatagcagcgtcaagccactcgtctcgaagaatttcaataagaaagtggtggagaagatgggactggtgtatcttgttcaatactctccggaccagtttaaaagttccaacattgcgaagaaagaactcagaaaagaattgatggatctgggctttaaagtccgctatataagcgaaaattacaagatgatggcgatcgaaggtacagccactcttcagggggtgaatcctctgcaagtttgggcgtatgaaatgattaaagctccggaagcgtgggctattacgggcggatccctgagcgttaaagtagcagtcctggataccgggatcgaccataatcacccatccttggccaacttcgtgaatactaatcttggccgctcgtttgttggaggaaacaccatggatgttcaaggtcatggcacacatgttgctggcacgattgcatcttatgggccggtaagcggagtgatgcagcaggcgacactgatcccggtcaaagtgctcgataattctggcagcgggtccctttacggtattacgcagggcatattgtatgccgccgacatcgatgcagacgtcattaacatgtctctgggtgggggaggctataatcagggcatggatgaggctactcaaacagcagttgctctgggaaccattgtagtagcagcgactggcaatgatggtgcatcgtcgatcagttatcctgctgcctacagcagcgtcattgcggtgggatctgtggaccaaaatcgtgttcgatcctcgttttctaactatggatctgggcttgaactgatggcaccgggcagcaacatctacagtacgtatcctaatggcagatatcgcacgttgagtggtacaagcatggctactccgcacgttgcgggcgtagctgggctcattcgcgcagccaacccagacataagtgtcgcgcaagcccgtcagattctgcgggataccgcgcaagaagcaggatcgttcacacagtacggctatggaatcgtcgatgctcatgccgccgttgttcgtgcatccggtggttcgggcggc

SEQ ID NO: 1618 - protein, 413 aa, synthetic construct
  REGION 1..413: note = Variant of serine peptidase from Bacillus sinesaloumensis
MADQASQANGNQDVIEGELIVSVEPKNGKPDVSIQSAQSVTGQEDVLKSKGFTIVDTLHVEDSSVKPLVSKNFNKKVVEKMGLVYLVQYSPDQFKSSNIAKKELRKELMDLGFKVRYISENYKMMAIEGTATLQGVNPLQVWAYEMIKAPEAWAITGGSLSVKVAVLDTGIDHNHPSLANFVNTNLGRSFVGGNTMDVQGHGTHVAGTIASYGPVSGVMQQATLIPVKVLDNSGSGSLYGITQGILYAADIDADVINMSLGGGGYNQGMDEATQTAVALGTIVVAATGNDGASSISYPAAYSSVIAVGSVDQNRVRSSFSNYGSGLELMAPGSNIYSTYPNGRYRTLSGTSMATPHVAGVAGLIRAANPDISVAQARQILRDTAQEAGSFTQYGYGIVDAHAAVVRASGGSGG

SEQ ID NO: 1619 - DNA, 1239 bp, synthetic construct
  misc_feature 1..1239: note = Variant of serine peptidase from Bacillus sinesaloumensis
  source 1..1239: mol_type = other DNA
atggcagatcaagctagtcaagctaatggaaaccaggacgtcattgaaggcgagctgatcgtttcagtggaaccgaagaacggtaaacctgatgtgagcattcaaagtgcacaatccgtaacagggcaggaagacgtccttaaatcgaaaggctttacgatcgttgataccttgcatgtagaggatagcagcgtcaagccactcgtctcgaagaatttcaataagaaagtggtggagaagatgggactggtgtatcttgttcaatactctccggaccagtttaaaagttccaacattgcgaagaaagaactcagaaaagaattgatggatctgggctttaaagtccgctatataagcgaaaattacaagatgatggcgatcgaaggtacagccactcttcagggggtgaatcctctgcaagtttgggcgtataatatgattaaagctccggaagcgtgggctattacgggcggatccctgagcgttaaagtagcagtcctggataccgggatcgaccataatcacccatccttggccaacttcgtgaatactaatcttggccgctcgtttgttggaggaaacaccatggatgttcaaggtcatggcacacatgttgctggcacgattgcatcttatgggccagtaagcggagtgatgcagagtgcgacactgatcccggtcaaagtgctcgataattctggcagcgggtccctttacggtattacgcagggcatattgtatgccgccgacatcgatgcagacgtcattaacatgtctctgggtggaggaggctataatcagggcatggatgaggctctgcaaacagcagttgctatgggaaccattgtagtagcagcgactggcaatgatggtgcatcgtcgatcagttatcctgctgcctacagcagcgtcattgcggtgggatctgtggaccaaaatcgtgttcgatcctcgttttctaactatggatctgggcttgaagtgatggcaccgggcagcaacatctacagtacgtatcctaatggcagatatcgcacgttgagtggtacaagcatggctactccgcacgttgcgggcgtagctgggctcattcgcgcagccaacccagacatagtggtcgcgcaagcccgtcagattctgcgggataccgcgcaagaagcaggatcgttcacacagtacggctatggaatcgtcgatgctcatgccgccgttgttgctgcatccggtggttcgggcggc

SEQ ID NO: 1620 - protein, 413 aa, synthetic construct
  REGION 1..413: note = Variant of serine peptidase from Bacillus sinesaloumensis
MADQASQANGNQDVIEGELIVSVEPKNGKPDVSIQSAQSVTGQEDVLKSKGFTIVDTLHVEDSSVKPLVSKNFNKKVVEKMGLVYLVQYSPDQFKSSNIAKKELRKELMDLGFKVRYISENYKMMAIEGTATLQGVNPLQVWAYNMIKAPEAWAITGGSLSVKVAVLDTGIDHNHPSLANFVNTNLGRSFVGGNTMDVQGHGTHVAGTIASYGPVSGVMQSATLIPVKVLDNSGSGSLYGITQGILYAADIDADVINMSLGGGGYNQGMDEALQTAVAMGTIVVAATGNDGASSISYPAAYSSVIAVGSVDQNRVRSSFSNYGSGLEVMAPGSNIYSTYPNGRYRTLSGTSMATPHVAGVAGLIRAANPDIVVAQARQILRDTAQEAGSFTQYGYGIVDAHAAVVAASGGSGG

SEQ ID NO: 1621 - DNA, 1239 bp, synthetic construct
  misc_feature 1..1239: note = Variant of serine peptidase from Bacillus sinesaloumensis
  source 1..1239: mol_type = other DNA
atggcagatcaagctagtcaagctaatggaaaccaggacgtcattgaaggcgagctgatcgtttcagtggaaccgaagaacggtaaacctgatgtgagcattcaaagtgcacaatccgtaacagggcaggaagacgtccttaaatcgaaaggctttacgatcgttgataccttgcatgtagaggatagcagcgtcaagccactcgtctcgaagaatttcaataagaaagtggtggagaagatgggactggtgtatcttgttcaatactctccggaccagtttaaaagttccaacattgcgaagaaagaactcagaaaagaattgatggatctgggctttaaagtccgctatataagcgaaaattacaagatgatggcgatcgaaggtacagccactcttcagggggtgaatcctctgcaagtttgggcgtatgaaatgattaaagctccggaagcgtgggctattacgggcggatccctgagcgttaaagtagcagtcctggatagcgggatcgaccataatcacccatccttggccaacttcgtgaatactaatcttggccgctcgtttgttggaggaaacaccatggatgttcaaggtcatggcacacatgttgctggcacgattgcatcttatgggccggtaagcggagtgatgcagagtgcgacactgatcccggtcaaagtgctcgataattctggcagcgggtccctttacggtattacgcagggcatattgtatgccgccgacatcgatgcagacgtcattaacatgtctctgggtggaggaggctataatcagggcatggatgaggctctgcaaacagcagttgctatgggaaccattgtagtagcagcgactggcaatgatggtgcatcgtcgatcagttatcctgctgcctacagcagcgtcattgcggtgggatctgtggaccaaaatcgtgttcgatcctcgttttctaactatggatctgggcttgaactgatggcaccgggcagcaacatctacagtacgtatcctaatggcagatatcgcagcttgagtggtacaagcatggctactccgcacgttgcgggcgtagctgggctcattcgcgcagccaacccagacatagttgtcgcgcaagcccgtcagattctgcgggataccgcgcaagaagcaggatcgttcacacagtacggctatggaatcgtcgatgctcatgccgccgttgttcgtgcatccggtggttcgggcggc

SEQ ID NO: 1622 - protein, 413 aa, synthetic construct
  REGION 1..413: note = Variant of serine peptidase from Bacillus sinesaloumensis
MADQASQANGNQDVIEGELIVSVEPKNGKPDVSIQSAQSVTGQEDVLKSKGFTIVDTLHVEDSSVKPLVSKNFNKKVVEKMGLVYLVQYSPDQFKSSNIAKKELRKELMDLGFKVRYISENYKMMAIEGTATLQGVNPLQVWAYEMIKAPEAWAITGGSLSVKVAVLDSGIDHNHPSLANFVNTNLGRSFVGGNTMDVQGHGTHVAGTIASYGPVSGVMQSATLIPVKVLDNSGSGSLYGITQGILYAADIDADVINMSLGGGGYNQGMDEALQTAVAMGTIVVAATGNDGASSISYPAAYSSVIAVGSVDQNRVRSSFSNYGSGLELMAPGSNIYSTYPNGRYRSLSGTSMATPHVAGVAGLIRAANPDIVVAQARQILRDTAQEAGSFTQYGYGIVDAHAAVVRASGGSGG

SEQ ID NO: 1623 - DNA, 1239 bp, synthetic construct
  misc_feature 1..1239: note = Variant of serine peptidase from Bacillus sinesaloumensis
  source 1..1239: mol_type = other DNA
atggcagatcaagctagtcaagctaatggaaaccaggacgtcattgaaggcgagctgatcgtttcagtggaaccgaagaacggtaaacctgatgtgagcattcaaagtgcacaatccgtaacagggcaggaagacgtccttaaatcgaaaggctttacgatcgttgataccttgcatgtagaggatagcagcgtcaagccactcgtctcgaagaatttcaataagaaagtggtggagaagatgggactggtgtatcttgttcaatactctccggaccagtttaaaagttccaacattgcgaagaaagaactcagaaaagaattgatggatctgggctttaaagtccgctatataagcgaaaattacaagatgatggcgatcgaaggtacagccactcttcagggggtgaatcctctgcaagtttgggcgtataatatgattaaagctccggaagcgtgggctattacgggcggatccctgagcgttaaagtagcagtcctggataccgggatcgaccataatcacccatccttggccaacttcgtgaatactaatcttggccgctcgtttgttggaggaaacaccatggatgttcaaggtcatggcacacatgttgctggcacgattgcatcttatgggccggtaagcggagtgatgcagtcggcgacactgatcccggtcaaagtgctcgataattctggcagcgggtccctttacggtattacgcagggcatattgtatgccgccgacatcgatgcagacgtcatgaacatgtctctgggtggaggaggctataatcagggcatggatgaggctctgcaaacagcagttgctatgggaaccattgtagtagcagcgactggcaatgatggtgcatcgtcgatcagttatcctgctgcctacagcagcgtcattgcggtgggatctgtggaccaaaatcgtgttcgatcctcgttttctaactatggatctgggcttgaactgatggcaccgggcagcaacatctacagtacgtatcctaatggcagatatcgcacgttgagtggtacaagcatggctactccgcacgttgcgggcgtagctgggctcattcgcgcagccaacccagacatagttgtcgcgcaagcccgtcagattctgcgggataccgcgcaagaagcaggatcgttcacacagtacggctatggaatcgtcgatgctcatgccgccgttgttgctgcatccggtggttcgggcggc

SEQ ID NO: 1624 - protein, 413 aa, synthetic construct
  REGION 1..413: note = Variant of serine peptidase from Bacillus sinesaloumensis
MADQASQANGNQDVIEGELIVSVEPKNGKPDVSIQSAQSVTGQEDVLKSKGFTIVDTLHVEDSSVKPLVSKNFNKKVVEKMGLVYLVQYSPDQFKSSNIAKKELRKELMDLGFKVRYISENYKMMAIEGTATLQGVNPLQVWAYNMIKAPEAWAITGGSLSVKVAVLDTGIDHNHPSLANFVNTNLGRSFVGGNTMDVQGHGTHVAGTIASYGPVSGVMQSATLIPVKVLDNSGSGSLYGITQGILYAADIDADVMNMSLGGGGYNQGMDEALQTAVAMGTIVVAATGNDGASSISYPAAYSSVIAVGSVDQNRVRSSFSNYGSGLELMAPGSNIYSTYPNGRYRTLSGTSMATPHVAGVAGLIRAANPDIVVAQARQILRDTAQEAGSFTQYGYGIVDAHAAVVAASGGSGG

SEQ ID NO: 1625 - DNA, 1239 bp, synthetic construct
  misc_feature 1..1239: note = Variant of serine peptidase from Bacillus sinesaloumensis
  source 1..1239: mol_type = other DNA
atggcagatcaagctagtcaagctaatggaaaccaggacgtcattgaaggcgagctgatcgtttcagtggaaccgaagaacggtaaacctgatgtgagcattcaaagtgcacaatccgtaacagggcaggaagacgtccttaaatcgaaaggctttacgatcgttgataccttgcatgtagaggatagcagcgtcaagccactcgtctcgaagaatttcaataagaaagtggtggagaagatgggactggtgtatcttgttcaatactctccggaccagtttaaaagttccaacattgcgaagaaagaactcagaaaagaattgatggatctgggctttaaagtccgctatataagcgaaaattacaagatgatggcgatcgaaggtacagccactcttcagggggtgaatcctctgcaagtttgggcgtatgaaatgattaaagctccggaagcgtgggctattacgggcggatccctgagcgttaaagtagcagtcctggataccgggatcgaccataatcacccatccttggccaacttcgtgaatactaatcttggccgctcgtttgttggaggaaacaccatggatgttcaaggtcatggcacacatgttgctggcacgattgcatcttatgggccggtaagcggagtgatgcagcaggcgacactgatcccggtcaaagtgctcgataattctggcagcgggtccctttacggtattacgcagggcatattgtatgccgccgacatcgatgcagacgtcatcaacatgtctctgggtggaggaggctataatcagggcatggatgaggctctgcaaacagcagttgctatgggaaccattgtagtagcagcgactggcaatgatggtgcatcgtcgatcagttatcctgctgcctacagcagcgtcattgcggtgggatctgtggaccaaaatcgtgttcgatcctcgttttctaactatggatctgggcttgaagtaatggcaccgggcagcaacatctacagtacgtatcctaatggcagatatcgcagcttgagtggtacaagcatggctactccgcacgttgcgggcgtagctgggctcattcgcgcagccaacccagacatagttgtcgcgcaagcccgtcagattctgcgggataccgcgcaagaagcaggatcgttcacacagtacggctatggaatcgtcgatgctcatgccgccgttgttcgtgcatccggtggttcgggcggc

SEQ ID NO: 1626 - protein, 413 aa, synthetic construct
  REGION 1..413: note = Variant of serine peptidase from Bacillus sinesaloumensis
MADQASQANGNQDVIEGELIVSVEPKNGKPDVSIQSAQSVTGQEDVLKSKGFTIVDTLHVEDSSVKPLVSKNFNKKVVEKMGLVYLVQYSPDQFKSSNIAKKELRKELMDLGFKVRYISENYKMMAIEGTATLQGVNPLQVWAYEMIKAPEAWAITGGSLSVKVAVLDTGIDHNHPSLANFVNTNLGRSFVGGNTMDVQGHGTHVAGTIASYGPVSGVMQQATLIPVKVLDNSGSGSLYGITQGILYAADIDADVINMSLGGGGYNQGMDEALQTAVAMGTIVVAATGNDGASSISYPAAYSSVIAVGSVDQNRVRSSFSNYGSGLEVMAPGSNIYSTYPNGRYRSLSGTSMATPHVAGVAGLIRAANPDIVVAQARQILRDTAQEAGSFTQYGYGIVDAHAAVVRASGGSGG

SEQ ID NO: 1627 - DNA, 1239 bp, synthetic construct
  misc_feature 1..1239: note = Variant of serine peptidase from Bacillus sinesaloumensis
  source 1..1239: mol_type = other DNA
atggcagatcaagctagtcaagctaatggaaaccaggacgtcattgaaggcgagctgatcgtttcagtggaaccgaagaacggtaaacctgatgtgagcattcaaagtgcacaatccgtaacagggcaggaagacgtccttaaatcgaaaggctttacgatcgttgataccttgcatgtagaggatagcagcgtcaagccactcgtctcgaagaatttcaataagaaagtggtggagaagatgggactggtgtatcttgttcaatactctccggaccagtttaaaagttccaacattgcgaagaaagaactcagaaaagaattgatggatctgggctttaaagtccgctatataagcgaaaattacaagatgatggcgatcgaaggtacagccactcttcagggggtgaatcctctgcaagtttgggcgtataatatgattaaagctccggaagcgtgggctattacgggcggatccctgagcgttaaagtagcagtcctggatacagggatcgaccataatcacccatccttggccaacttcgtgaatactaatcttggccgctcgtttgttggaggaaacaccatggatgttcaaggtcatggcacacatgttgctggcacgattgcatcttatgggccagtaagcggagtgatgcagagtgcgacactgatcccggtcaaagtgctcgataattctggcagcgggtccctttacggtattacgctgggcatattgtatgccgccgacatcgatgcagacgtcattaacatgtctctgggtggaggaggctataatcagggcatggatgaggctctgcaaacagcagttgctatgggaaccattgtagtagcagcgactggcaatgatggtgcatcgtcgatcagttatcctgctgcctacagcagcgtcattgcggtgggatctgtggaccaaaatcgtgttcgatcctcgttttctaactatggatctgggcttgaactgatggcaccgggcagcaacatctacagtacgtatcctaatggcagatatcgcacgttgagtggtacaagcatggctactccgcacgttgcgggcgtagctgggctcattcgcgcagccaacccagacatagttgtcgcgcaagcccgtcagattctgcgggataccgcgcaagaagcaggatcgttcacacagtacggctatggaatcgtcgatgctcatgccgccgttgttgcggcatccggtggttcgggcggc

SEQ ID NO: 1628 - protein, 413 aa, synthetic construct
  REGION 1..413: note = Variant of serine peptidase from Bacillus sinesaloumensis
MADQASQANGNQDVIEGELIVSVEPKNGKPDVSIQSAQSVTGQEDVLKSKGFTIVDTLHVEDSSVKPLVSKNFNKKVVEKMGLVYLVQYSPDQFKSSNIAKKELRKELMDLGFKVRYISENYKMMAIEGTATLQGVNPLQVWAYNMIKAPEAWAITGGSLSVKVAVLDTGIDHNHPSLANFVNTNLGRSFVGGNTMDVQGHGTHVAGTIASYGPVSGVMQSATLIPVKVLDNSGSGSLYGITLGILYAADIDADVINMSLGGGGYNQGMDEALQTAVAMGTIVVAATGNDGASSISYPAAYSSVIAVGSVDQNRVRSSFSNYGSGLELMAPGSNIYSTYPNGRYRTLSGTSMATPHVAGVAGLIRAANPDIVVAQARQILRDTAQEAGSFTQYGYGIVDAHAAVVAASGGSGG

SEQ ID NO: 1629 - DNA, 1239 bp, synthetic construct
  misc_feature 1..1239: note = Variant of serine peptidase from Bacillus sinesaloumensis
  source 1..1239: mol_type = other DNA
atggcagatcaagctagtcaagctaatggaaaccaggacgtcattgaaggcgagctgatcgtttcagtggaaccgaagaacggtaaacctgatgtgagcattcaaagtgcacaatccgtaacagggcaggaagacgtccttaaatcgaaaggctttacgatcgttgataccttgcatgtagaggatagcagcgtcaagccactcgtctcgaagaatttcaataagaaagtggtggagaagatgggactggtgtatcttgttcaatactctccggaccagtttaaaagttccaacattgcgaagaaagaactcagaaaagaattgatggatctgggctttaaagtccgctatataagcgaaaattacaagatgatggcgatcgaaggtacagccactcttcagggggtgaatcctctgcaagtttgggcgtatgaaatgattaaagctccggaagcgtgggctattacgggcggatccctgagcgttaaagtagcagtcctggataccgggatcgaccataatcacccatccttggccaacttcgtgaatactaatcttggccgctcgtttgttggaggaaacaccatggatgttcaaggtcatggcacacatgttgctggcacgattgcatcttatggggtagtaagcggagtgatgcagagtgcgacactgatcccggtcaaagtgctcgataattctggcagcgggtccctttacggtattacgcagggcatattgtatgccgccgacatcgatgcagacgtcatgaacatgtctctgggtgggggaggctataatcagggcatggatgaggctctgcaaacagcagttgctctgggaaccattgtagtagcagcgactggcaatgatggtgcatcgtcgatcagttatcctgctgcctacagcagcgtcattgcggtgggatctgtggaccaaaatcgtgttcgatcctcgttttctaactatggatctgggcttgaagtgatggcaccgggcagcaacatctacagtacgtatcctaatggcagatatcgcacgttgagtggtacaagcatggctactccgcacgttgcgggcgtagctgggctcattcgcgcagccaacccagacataagtgtcgcgcaagcccgtcagattctgcgggataccgcgcaagaagcaggatcgttcacacagtacggctatggaatcgtcgatgctcatgccgccgttgttgcggcatccggtggttcgggcggc

SEQ ID NO: 1630 - protein, 413 aa, synthetic construct
  REGION 1..413: note = Variant of serine peptidase from Bacillus sinesaloumensis
MADQASQANGNQDVIEGELIVSVEPKNGKPDVSIQSAQSVTGQEDVLKSKGFTIVDTLHVEDSSVKPLVSKNFNKKVVEKMGLVYLVQYSPDQFKSSNIAKKELRKELMDLGFKVRYISENYKMMAIEGTATLQGVNPLQVWAYEMIKAPEAWAITGGSLSVKVAVLDTGIDHNHPSLANFVNTNLGRSFVGGNTMDVQGHGTHVAGTIASYGVVSGVMQSATLIPVKVLDNSGSGSLYGITQGILYAADIDADVMNMSLGGGGYNQGMDEALQTAVALGTIVVAATGNDGASSISYPAAYSSVIAVGSVDQNRVRSSFSNYGSGLEVMAPGSNIYSTYPNGRYRTLSGTSMATPHVAGVAGLIRAANPDISVAQARQILRDTAQEAGSFTQYGYGIVDAHAAVVAASGGSGG

SEQ ID NO: 1631 - DNA, 1239 bp, synthetic construct
  misc_feature 1..1239: note = Variant of serine peptidase from Bacillus sinesaloumensis
  source 1..1239: mol_type = other DNA
atggcagatcaagctagtcaagctaatggaaaccaggacgtcattgaaggcgagctgatcgtttcagtggaaccgaagaacggtaaacctgatgtgagcattcaaagtgcacaatccgtaacagggcaggaagacgtccttaaatcgaaaggctttacgatcgttgataccttgcatgtagaggatagcagcgtcaagccactcgtctcgaagaatttcaataagaaagtggtggagaagatgggactggtgtatcttgttcaatactctccggaccagtttaaaagttccaacattgcgaagaaagaactcagaaaagaattgatggatctgggctttaaagtccgctatataagcgaaaattacaagatgatggcgatcgaaggtacagccactcttcagggggtgaatcctctgcaagtttgggcgtataatatgattaaagctccggaagcgtgggctattacgggcggatccctgagcgttaaagtagcagtcctggatagcgggatcgaccataatcacccatccttggccaacttcgtgaatactaatcttggccgctcgtttgttggaggaaacaccatggatgttcaaggtcatggcacacatgttgctggcacgattgcatcttatgggccggtaagcggagtgatgcagcaggcgacactgatcccggtcaaagtgctcgataattctggcagcgggtccctttacggtattacgcagggcatattgtatgccgccgacatcgatgcagacgtcattaacatgtctctgggtggaggaggctataatcagggcatggatgaggctactcaaacagcagttgctatgggaaccattgtagtagcagcgactggcaatgatggtgcatcgtcgatcagttatcctgctgcctacagcagcgtcattgcggtgggatctgtggaccaaaatcgtgttcgatcctcgttttctaactatggatctgggcttgaagtgatggcaccgggcagcaacatctacagtacgtatcctaatggcagatatcgcacgttgagtggtacaagcatggctactccgcacgttgcgggcgtagctgggctcattcgcgcagccaacccagacataagtgtcgcgcaagcccgtcagattctgcgggataccgcgcaagaagcaggatcgttcacacagtacggctatggaatcgtcgatgctcatgccgccgttgttcgtgcatccggtggttcgggcggc

SEQ ID NO: 1632 - protein, 413 aa, synthetic construct
  REGION 1..413: note = Variant of serine peptidase from Bacillus sinesaloumensis
MADQASQANGNQDVIEGELIVSVEPKNGKPDVSIQSAQSVTGQEDVLKSKGFTIVDTLHVEDSSVKPLVSKNFNKKVVEKMGLVYLVQYSPDQFKSSNIAKKELRKELMDLGFKVRYISENYKMMAIEGTATLQGVNPLQVWAYNMIKAPEAWAITGGSLSVKVAVLDSGIDHNHPSLANFVNTNLGRSFVGGNTMDVQGHGTHVAGTIASYGPVSGVMQQATLIPVKVLDNSGSGSLYGITQGILYAADIDADVINMSLGGGGYNQGMDEATQTAVAMGTIVVAATGNDGASSISYPAAYSSVIAVGSVDQNRVRSSFSNYGSGLEVMAPGSNIYSTYPNGRYRTLSGTSMATPHVAGVAGLIRAANPDISVAQARQILRDTAQEAGSFTQYGYGIVDAHAAVVRASGGSGG

SEQ ID NO: 1633 - DNA, 1239 bp, synthetic construct
  misc_feature 1..1239: note = Variant of serine peptidase from Bacillus sinesaloumensis
  source 1..1239: mol_type = other DNA
atggcagatcaagctagtcaagctaatggaaaccaggacgtcattgaaggcgagctgatcgtttcagtggaaccgaagaacggtaaacctgatgtgagcattcaaagtgcacaatccgtaacagggcaggaagacgtccttaaatcgaaaggctttacgatcgttgataccttgcatgtagaggatagcagcgtcaagccactcgtctcgaagaatttcaataagaaagtggtggagaagatgggactggtgtatcttgttcaatactctccggaccagtttaaaagttccaacattgcgaagaaagaactcagaaaagaattgatggatctgggctttaaagtccgctatataagcgaaaattacaagatgatggcgatcgaaggtacagccactcttcagggggtgaatcctctgcaagtttgggcgtataatatgattaaagctccggaagcgtgggctattacgggcggatccctgagcgttaaagtagcagtcctggatacagggatcgaccataatcacccatccttggccaacttcgtgaatactaatcttggccgctcgtttgttggaggaaacaccatggatgttcaaggtcatggcacacatgttgctggcacgattgcatcttatgggccagtaagcggagtgatgcagagtgcgacactgatcccggtcaaagtgctcgataattctggcagcgggtccctttacggtattacgcagggcatattgtatgccgccgacatcgatgcagacgtcatcaacatgtctctgggtggaggaggctataatcagggcatggatgaggctactcaaacagcagttgctatgggaaccattgtagtagcagcgactggcaatgatggtgcatcgtcgatcagttatcctgctgcctacagcagcgtcattgcggtgggatctgtggaccaaaatcgtgttcgatcctcgttttctaactatggatctgggcttgaactgatggcaccgggcagcaacatctacagtacgtatcctaatggcagatatcgcaccttgagtggtacaagcatggctactccgcacgttgcgggcgtagctgggctcattcgcgcagccaacccagacataagtgtcgcgcaagcccgtcagattctgcgggataccgcgcaagaagcaggatcgttcacacagtacggctatggaatcgtcgatgctcatgccgccgttgttcgtgcatccggtggttcgggcggc

SEQ ID NO: 1634 - protein, 413 aa, synthetic construct
  REGION 1..413: note = Variant of serine peptidase from Bacillus sinesaloumensis
MADQASQANGNQDVIEGELIVSVEPKNGKPDVSIQSAQSVTGQEDVLKSKGFTIVDTLHVEDSSVKPLVSKNFNKKVVEKMGLVYLVQYSPDQFKSSNIAKKELRKELMDLGFKVRYISENYKMMAIEGTATLQGVNPLQVWAYNMIKAPEAWAITGGSLSVKVAVLDTGIDHNHPSLANFVNTNLGRSFVGGNTMDVQGHGTHVAGTIASYGPVSGVMQSATLIPVKVLDNSGSGSLYGITQGILYAADIDADVINMSLGGGGYNQGMDEATQTAVAMGTIVVAATGNDGASSISYPAAYSSVIAVGSVDQNRVRSSFSNYGSGLELMAPGSNIYSTYPNGRYRTLSGTSMATPHVAGVAGLIRAANPDISVAQARQILRDTAQEAGSFTQYGYGIVDAHAAVVRASGGSGG

SEQ ID NO: 1635 - DNA, 1239 bp, synthetic construct
  misc_feature 1..1239: note = Variant of serine peptidase from Bacillus sinesaloumensis
  source 1..1239: mol_type = other DNA
atggcagatcaagctagtcaagctaatggaaaccaggacgtcattgaaggcgagctgatcgtttcagtggaaccgaagaacggtaaacctgatgtgagcattcaaagtgcacaatccgtaacagggcaggaagacgtccttaaatcgaaaggctttacgatcgttgataccttgcatgtagaggatagcagcgtcaagccactcgtctcgaagaatttcaataagaaagtggtggagaagatgggactggtgtatcttgttcaatactctccggaccagtttaaaagttccaacattgcgaagaaagaactcagaaaagaattgatggatctgggctttaaagtccgctatataagcgaaaattacaagatgatggcgatcgaaggtacagccactcttcagggggtgaatcctctgcaagtttgggcgtataatatgattaaagctccggaagcgtgggctattacgggcggatccctgagcgttaaagtagcagtcctggatagcgggatcgaccataatcacccatccttggccaacttcgtgaatactaatcttggccgctcgtttgttggaggaaacaccatggatgttcaaggtcatggcacacatgttgctggcacgattgcatcttatgggccagtaagcggagtgatgcagtcggcgacactgatcccggtcaaagtgctcgataattctggcagcgggtccctttacggtattacgcagggcatattgtatgccgccgacatcgatgcagacgtcattaacatgtctctgggtggaggaggctataatcagggcatggatgaggctactcaaacagcagttgctatgggaaccattgtagtagcagcgactggcaatgatggtgcatcgtcgatcagttatcctgctgcctacagcagcgtcattgcggtgggatctgtggaccaaaatcgtgttcgatcctcgttttctaactatggatctgggcttgaagtgatggcaccgggcagcaacatctacagtacgtatcctaatggcagatatcgcaccttgagtggtacaagcatggctactccgcacgttgcgggcgtagctgggctcattcgcgcagccaacccagacataagtgtcgcgcaagcccgtcagattctgcgggataccgcgcaagaagcaggatcgttcacacagtacggctatggaatcgtcgatgctcatgccgccgttgttcgtgcatccggtggttcgggcggc

SEQ ID NO: 1636 - protein, 413 aa, synthetic construct
  REGION 1..413: note = Variant of serine peptidase from Bacillus sinesaloumensis
MADQASQANGNQDVIEGELIVSVEPKNGKPDVSIQSAQSVTGQEDVLKSKGFTIVDTLHVEDSSVKPLVSKNFNKKVVEKMGLVYLVQYSPDQFKSSNIAKKELRKELMDLGFKVRYISENYKMMAIEGTATLQGVNPLQVWAYNMIKAPEAWAITGGSLSVKVAVLDSGIDHNHPSLANFVNTNLGRSFVGGNTMDVQGHGTHVAGTIASYGPVSGVMQSATLIPVKVLDNSGSGSLYGITQGILYAADIDADVINMSLGGGGYNQGMDEATQTAVAMGTIVVAATGNDGASSISYPAAYSSVIAVGSVDQNRVRSSFSNYGSGLEVMAPGSNIYSTYPNGRYRTLSGTSMATPHVAGVAGLIRAANPDISVAQARQILRDTAQEAGSFTQYGYGIVDAHAAVVRASGGSGG

SEQ ID NO: 1637 - DNA, 1239 bp, synthetic construct
  misc_feature 1..1239: note = Variant of serine peptidase from Bacillus sinesaloumensis
  source 1..1239: mol_type = other DNA
atggcagatcaagctagtcaagctaatggaaaccaggacgtcattgaaggcgagctgatcgtttcagtggaaccgaagaacggtaaacctgatgtgagcattcaaagtgcacaatccgtaacagggcaggaagacgtccttaaatcgaaaggctttacgatcgttgataccttgcatgtagaggatagcagcgtcaagccactcgtctcgaagaatttcaataagaaagtggtggagaagatgggactggtgtatcttgttcaatactctccggaccagtttaaaagttccaacattgcgaagaaagaactcagaaaagaattgatggatctgggctttaaagtccgctatataagcgaaaattacaagatgatggcgatcgaaggtacagccactcttcagggggtgaatcctctgcaagtttgggcgtataatatgattaaagctccggaagcgtgggctattacgggcggatccctgagcgttaaagtagcagtcctggatacagggatcgaccataatcacccatccttggccaacttcgtgaatactaatcttggccgctcgtttgttggaggaaacaccatggatgttcaaggtcatggcacacatgttgctggcacgattgcatcttatgggccggtaagcggagtgatgcagcaggcgacactgatcccggtcaaagtgctcgataattctggcagcgggtccctttacggtattacgcagggcatattgtatgccgccgacatcgatgcagacgtcattaacatgtctctgggtggaggaggctataatcagggcatggatgaggctactcaaacagcagttgctatgggaaccattgtagtagcagcgactggcaatgatggtgcatcgtcgatcagttatcctgctgcctacagcagcgtcattgcggtgggatctgtggaccaaaatcgtgttcgatcctcgttttctaactatggatctgggcttgaactgatggcaccgggcagcaacatctacagtacgtatcctaatggcagatatcgcacgttgagtggtacaagcatggctactccgcacgttgcgggcgtagctgggctcattcgcgcagccaacccagacataagtgtcgcgcaagcccgtcagattctgcgggataccgcgcaagaagcaggatcgttcacacagtacggctatggaatcgtcgatgctcatgccgccgttgttgctgcatccggtggttcgggcggc

SEQ ID NO: 1638 - protein, 413 aa, synthetic construct
  REGION 1..413: note = Variant of serine peptidase from Bacillus sinesaloumensis
MADQASQANGNQDVIEGELIVSVEPKNGKPDVSIQSAQSVTGQEDVLKSKGFTIVDTLHVEDSSVKPLVSKNFNKKVVEKMGLVYLVQYSPDQFKSSNIAKKELRKELMDLGFKVRYISENYKMMAIEGTATLQGVNPLQVWAYNMIKAPEAWAITGGSLSVKVAVLDTGIDHNHPSLANFVNTNLGRSFVGGNTMDVQGHGTHVAGTIASYGPVSGVMQQATLIPVKVLDNSGSGSLYGITQGILYAADIDADVINMSLGGGGYNQGMDEATQTAVAMGTIVVAATGNDGASSISYPAAYSSVIAVGSVDQNRVRSSFSNYGSGLELMAPGSNIYSTYPNGRYRTLSGTSMATPHVAGVAGLIRAANPDISVAQARQILRDTAQEAGSFTQYGYGIVDAHAAVVAASGGSGG

SEQ ID NO: 1639 - DNA, 1239 bp, synthetic construct
  misc_feature 1..1239: note = Variant of serine peptidase from Bacillus sinesaloumensis
  source 1..1239: mol_type = other DNA
atggcagatcaagctagtcaagctaatggaaaccaggacgtcattgaaggcgagctgatcgtttcagtggaaccgaagaacggtaaacctgatgtgagcattcaaagtgcacaatccgtaacagggcaggaagacgtccttaaatcgaaaggctttacgatcgttgataccttgcatgtagaggatagcagcgtcaagccactcgtctcgaagaatttcaataagaaagtggtggagaagatgggactggtgtatcttgttcaatactctccggaccagtttaaaagttccaacattgcgaagaaagaactcagaaaagaattgatggatctgggctttaaagtccgctatataagcgaaaattacaagatgatggcgatcgaaggtacagccactcttcagggggtgaatcctctgcaagtttgggcgtatgaaatgattaaagctccggaagcgtgggctattacgggcggatccctgagcgttaaagtagcagtcctggatacagggatcgaccataatcacccatccttggccaacttcgtgaatactaatcttggccgctcgtttgttggaggaaacaccatggatgttcaaggtcatggcacacatgttgctggcacgattgcatcttatgggccggtaagcggagtgatgcagcaggcgacactgatcccggtcaaagtgctcgataattctggcagcgggtccctttacggtattacgcagggcatattgtatgccgccgacatcgatgcagacgtcattaacatgtctctgggtggaggaggctataatcagggcatggatgaggctctgcaaacagcagttgctatgggaaccattgtagtagcagcgactggcaatgatggtgcatcgtcgatcagttatcctgctgcctacagcagcgtcattgcggtgggatctgtggaccaaaatcgtgttcgatcctcgttttctaactatggatctgggcttgaagtgatggcaccgggcagcaacatctacagtacgtatcctaatggcagatatcgcacgttgagtggtacaagcatggctactccgcacgttgcgggcgtagctgggctcattcgcgcagccaacccagacataagtgtcgcgcaagcccgtcagattctgcgggataccgcgcaagaagcaggatcgttcacacagtacggctatggaatcgtcgatgctcatgccgccgttgttgctgcatccggtggttcgggcggc

SEQ ID NO: 1640 - protein, 413 aa, synthetic construct
  REGION 1..413: note = Variant of serine peptidase from Bacillus sinesaloumensis
MADQASQANGNQDVIEGELIVSVEPKNGKPDVSIQSAQSVTGQEDVLKSKGFTIVDTLHVEDSSVKPLVSKNFNKKVVEKMGLVYLVQYSPDQFKSSNIAKKELRKELMDLGFKVRYISENYKMMAIEGTATLQGVNPLQVWAYEMIKAPEAWAITGGSLSVKVAVLDTGIDHNHPSLANFVNTNLGRSFVGGNTMDVQGHGTHVAGTIASYGPVSGVMQQATLIPVKVLDNSGSGSLYGITQGILYAADIDADVINMSLGGGGYNQGMDEALQTAVAMGTIVVAATGNDGASSISYPAAYSSVIAVGSVDQNRVRSSFSNYGSGLEVMAPGSNIYSTYPNGRYRTLSGTSMATPHVAGVAGLIRAANPDISVAQARQILRDTAQEAGSFTQYGYGIVDAHAAVVAASGGSGG

SEQ ID NO: 1641 - DNA, 1239 bp, synthetic construct
  misc_feature 1..1239: note = Variant of serine peptidase from Bacillus sinesaloumensis
  source 1..1239: mol_type = other DNA
atggcagatcaagctagtcaagctaatggaaaccaggacgtcattgaaggcgagctgatcgtttcagtggaaccgaagaacggtaaacctgatgtgagcattcaaagtgcacaatccgtaacagggcaggaagacgtccttaaatcgaaaggctttacgatcgttgataccttgcatgtagaggatagcagcgtcaagccactcgtctcgaagaatttcaataagaaagtggtggagaagatgggactggtgtatcttgttcaatactctccggaccagtttaaaagttccaacattgcgaagaaagaactcagaaaagaattgatggatctgggctttaaagtccgctatataagcgaaaattacaagatgatggcgatcgaaggtacagccactcttcagggggtgaatcctctgcaagtttgggcgtataatatgattaaagctccggaagcgtgggctattacgggcggatccctgagcgttaaagtagcagtcctggataccgggatcgaccataatcacccatccttggccaacttcgtgaatactaatcttggccgctcgtttgttggaggaaacaccatggatgttcaaggtcatggcacacatgttgctggcacgattgcatcttatggggtagtaagcggagtgatgcagagtgcgacactgatcccggtcaaagtgctcgataattctggcagcgggtccctttacggtattacgctgggcatattgtatgccgccgacatcgatgcagacgtcattaacatgtctctgggtgggggaggctataatcagggcatggatgaggctctgcaaacagcagttgctatgggaaccattgtagtagcagcgactggcaatgatggtgcatcgtcgatcagttatcctgctgcctacagcagcgtcattgcggtgggatctgtggaccaaaatcgtgttcgatcctcgttttctaactatggatctgggcttgaagtgatggcaccgggcagcaacatctacagtacgtatcctaatggcagatatcgcacgttgagtggtacaagcatggctactccgcacgttgcgggcgtagctgggctcattcgcgcagccaacccagacatagtggtcgcgcaagcccgtcagattctgcgggataccgcgcaagaagcaggatcgttcacacagtacggctatggaatcgtcgatgctcatgccgccgttgttgcggcatccggtggttcgggcggc

SEQ ID NO: 1642 - protein, 413 aa, synthetic construct
  REGION 1..413: note = Variant of serine peptidase from Bacillus sinesaloumensis
MADQASQANGNQDVIEGELIVSVEPKNGKPDVSIQSAQSVTGQEDVLKSKGFTIVDTLHVEDSSVKPLVSKNFNKKVVEKMGLVYLVQYSPDQFKSSNIAKKELRKELMDLGFKVRYISENYKMMAIEGTATLQGVNPLQVWAYNMIKAPEAWAITGGSLSVKVAVLDTGIDHNHPSLANFVNTNLGRSFVGGNTMDVQGHGTHVAGTIASYGVVSGVMQSATLIPVKVLDNSGSGSLYGITLGILYAADIDADVINMSLGGGGYNQGMDEALQTAVAMGTIVVAATGNDGASSISYPAAYSSVIAVGSVDQNRVRSSFSNYGSGLEVMAPGSNIYSTYPNGRYRTLSGTSMATPHVAGVAGLIRAANPDIVVAQARQILRDTAQEAGSFTQYGYGIVDAHAAVVAASGGSGG

SEQ ID NO: 1643 - DNA, 1239 bp, synthetic construct
  misc_feature 1..1239: note = Variant of serine peptidase from Bacillus sinesaloumensis
  source 1..1239: mol_type = other DNA
atggcagatcaagctagtcaagctaatggaaaccaggacgtcattgaaggcgagctgatcgtttcagtggaaccgaagaacggtaaacctgatgtgagcattcaaagtgcacaatccgtaacagggcaggaagacgtccttaaatcgaaaggctttacgatcgttgataccttgcatgtagaggatagcagcgtcaagccactcgtctcgaagaatttcaataagaaagtggtggagaagatgggactggtgtatcttgttcaatactctccggaccagtttaaaagttccaacattgcgaagaaagaactcagaaaagaattgatggatctgggctttaaagtccgctatataagcgaaaattacaagatgatggcgatcgaaggtacagccactcttcagggggtgaatcctctgcaagtttgggcgtatgaaatgattaaagctccggaagcgtgggctattacgggcggatccctgagcgttaaagtagcagtcctggatacagggatcgaccataatcacccatccttggccaacttcgtgaatactaatcttggccgctcgtttgttggaggaaacaccatggatgttcaaggtcatggcacacatgttgctggcacgattgcatcttatgggccggtaagcggagtgatgcagcaggcgacactgatcccggtcaaagtgctcgataattctggcagcgggtccctttacggtattacgcagggcatattgtatgccgccgacatcgatgcagacgtcattaacatgtctctgggtggaggaggctataatcagggcatggatgaggctactcaaacagcagttgctatgggaaccattgtagtagcagcgactggcaatgatggtgcatcgtcgatcagttatcctgctgcctacagcagcgtcattgcggtgggatctgtggaccaaaatcgtgttcgatcctcgttttctaactatggatctgggcttgaactgatggcaccgggcagcaacatctacagtacgtatcctaatggcagatatcgcacgttgagtggtacaagcatggctactccgcacgttgcgggcgtagctgggctcattcgcgcagccaacccagacatagttgtcgcgcaagcccgtcagattctgcgggataccgcgcaagaagcaggatcgttcacacagtacggctatggaatcgtcgatgctcatgccgccgttgttgcggcatccggtggttcgggcggc

SEQ ID NO: 1644 - protein, 413 aa, synthetic construct
  REGION 1..413: note = Variant of serine peptidase from Bacillus sinesaloumensis
MADQASQANGNQDVIEGELIVSVEPKNGKPDVSIQSAQSVTGQEDVLKSKGFTIVDTLHVEDSSVKPLVSKNFNKKVVEKMGLVYLVQYSPDQFKSSNIAKKELRKELMDLGFKVRYISENYKMMAIEGTATLQGVNPLQVWAYEMIKAPEAWAITGGSLSVKVAVLDTGIDHNHPSLANFVNTNLGRSFVGGNTMDVQGHGTHVAGTIASYGPVSGVMQQATLIPVKVLDNSGSGSLYGITQGILYAADIDADVINMSLGGGGYNQGMDEATQTAVAMGTIVVAATGNDGASSISYPAAYSSVIAVGSVDQNRVRSSFSNYGSGLELMAPGSNIYSTYPNGRYRTLSGTSMATPHVAGVAGLIRAANPDIVVAQARQILRDTAQEAGSFTQYGYGIVDAHAAVVAASGGSGG

SEQ ID NO: 1645 - DNA, 1239 bp, synthetic construct
  misc_feature 1..1239: note = Variant of serine peptidase from Bacillus sinesaloumensis
  source 1..1239: mol_type = other DNA
atggcagatcaagctagtcaagctaatggaaaccaggacgtcattgaaggcgagctgatcgtttcagtggaaccgaagaacggtaaacctgatgtgagcattcaaagtgcacaatccgtaacagggcaggaagacgtccttaaatcgaaaggctttacgatcgttgataccttgcatgtagaggatagcagcgtcaagccactcgtctcgaagaatttcaataagaaagtggtggagaagatgggactggtgtatcttgttcaatactctccggaccagtttaaaagttccaacattgcgaagaaagaactcagaaaagaattgatggatctgggctttaaagtccgctatataagcgaaaattacaagatgatggcgatcgaaggtacagccactcttcagggggtgaatcctctgcaagtttgggcgtataatatgattaaagctccggaagcgtgggctattacgggcggatccctgagcgttaaagtagcagtcctggataccgggatcgaccataatcacccatccttggccaacttcgtgaatactaatcttggccgctcgtttgttggaggaaacaccatggatgttcaaggtcatggcacacatgttgctggcacgattgcatcttatggggtagtaagcggagtgatgcagtcggcgacactgatcccggtcaaagtgctcgataattctggcagcgggtccctttacggtattacgcagggcatattgtatgccgccgacatcgatgcagacgtcatgaacatgtctctgggtgggggaggctataatcagggcatggatgaggctctgcaaacagcagttgctatgggaaccattgtagtagcagcgactggcaatgatggtgcatcgtcgatcagttatcctgctgcctacagcagcgtcattgcggtgggatctgtggaccaaaatcgtgttcgatcctcgttttctaactatggatctgggcttgaactgatggcaccgggcagcaacatctacagtacgtatcctaatggcagatatcgcagcttgagtggtacaagcatggctactccgcacgttgcgggcgtagctgggctcattcgcgcagccaacccagacataagtgtcgcgcaagcccgtcagattctgcgggataccgcgcaagaagcaggatcgttcacacagtacggctatggaatcgtcgatgctcatgccgccgttgttgcggcatccggtggttcgggcggc

SEQ ID NO: 1646 - protein, 413 aa, synthetic construct
  REGION 1..413: note = Variant of serine peptidase from Bacillus sinesaloumensis
MADQASQANGNQDVIEGELIVSVEPKNGKPDVSIQSAQSVTGQEDVLKSKGFTIVDTLHVEDSSVKPLVSKNFNKKVVEKMGLVYLVQYSPDQFKSSNIAKKELRKELMDLGFKVRYISENYKMMAIEGTATLQGVNPLQVWAYNMIKAPEAWAITGGSLSVKVAVLDTGIDHNHPSLANFVNTNLGRSFVGGNTMDVQGHGTHVAGTIASYGVVSGVMQSATLIPVKVLDNSGSGSLYGITQGILYAADIDADVMNMSLGGGGYNQGMDEALQTAVAMGTIVVAATGNDGASSISYPAAYSSVIAVGSVDQNRVRSSFSNYGSGLELMAPGSNIYSTYPNGRYRSLSGTSMATPHVAGVAGLIRAANPDISVAQARQILRDTAQEAGSFTQYGYGIVDAHAAVVAASGGSGG

SEQ ID NO: 1647 - DNA, 1239 bp, synthetic construct
  misc_feature 1..1239: note = Variant of serine peptidase from Bacillus sinesaloumensis
  source 1..1239: mol_type = other DNA
atggcagatcaagctagtcaagctaatggaaaccaggacgtcattgaaggcgagctgatcgtttcagtggaaccgaagaacggtaaacctgatgtgagcattcaaagtgcacaatccgtaacagggcaggaagacgtccttaaatcgaaaggctttacgatcgttgataccttgcatgtagaggatagcagcgtcaagccactcgtctcgaagaatttcaataagaaagtggtggagaagatgggactggtgtatcttgttcaatactctccggaccagtttaaaagttccaacattgcgaagaaagaactcagaaaagaattgatggatctgggctttaaagtccgctatataagcgaaaattacaagatgatggcgatcgaaggtacagccactcttcagggggtgaatcctctgcaagtttgggcgtataatatgattaaagctccggaagcgtgggctattacgggcggatccctgagcgttaaagtagcagtcctggataccgggatcgaccataatcacccatccttggccaacttcgtgaatactaatcttggccgctcgtttgttggaggaaacaccatggatgttcaaggtcatggcacacatgttgctggcacgattgcatcttatgggccggtaagcggagtgatgcagcaggcgacactgatcccggtcaaagtgctcgataattctggcagcgggtccctttacggtattacgcagggcatattgtatgccgccgacatcgatgcagacgtcattaacatgtctctgggtggaggaggctataatcagggcatggatgaggctactcaaacagcagttgctatgggaaccattgtagtagcagcgactggcaatgatggtgcatcgtcgatcagttatcctgctgcctacagcagcgtcattgcggtgggatctgtggaccaaaatcgtgttcgatcctcgttttctaactatggatctgggcttgaactgatggcaccgggcagcaacatctacagtacgtatcctaatggcagatatcgcaccttgagtggtacaagcatggctactccgcacgttgcgggcgtagctgggctcattcgcgcagccaacccagacatagttgtcgcgcaagcccgtcagattctgcgggataccgcgcaagaagcaggatcgttcacacagtacggctatggaatcgtcgatgctcatgccgccgttgttcgtgcatccggtggttcgggcggc

SEQ ID NO: 1648 - protein, 413 aa, synthetic construct
  REGION 1..413: note = Variant of serine peptidase from Bacillus sinesaloumensis
MADQASQANGNQDVIEGELIVSVEPKNGKPDVSIQSAQSVTGQEDVLKSKGFTIVDTLHVEDSSVKPLVSKNFNKKVVEKMGLVYLVQYSPDQFKSSNIAKKELRKELMDLGFKVRYISENYKMMAIEGTATLQGVNPLQVWAYNMIKAPEAWAITGGSLSVKVAVLDTGIDHNHPSLANFVNTNLGRSFVGGNTMDVQGHGTHVAGTIASYGPVSGVMQQATLIPVKVLDNSGSGSLYGITQGILYAADIDADVINMSLGGGGYNQGMDEATQTAVAMGTIVVAATGNDGASSISYPAAYSSVIAVGSVDQNRVRSSFSNYGSGLELMAPGSNIYSTYPNGRYRTLSGTSMATPHVAGVAGLIRAANPDIVVAQARQILRDTAQEAGSFTQYGYGIVDAHAAVVRASGGSGG

SEQ ID NO: 1649 - DNA, 1239 bp, synthetic construct
  misc_feature 1..1239: note = Variant of serine peptidase from Bacillus sinesaloumensis
  source 1..1239: mol_type = other DNA
atggcagatcaagctagtcaagctaatggaaaccaggacgtcattgaaggcgagctgatcgtttcagtggaaccgaagaacggtaaacctgatgtgagcattcaaagtgcacaatccgtaacagggcaggaagacgtccttaaatcgaaaggctttacgatcgttgataccttgcatgtagaggatagcagcgtcaagccactcgtctcgaagaatttcaataagaaagtggtggagaagatgggactggtgtatcttgttcaatactctccggaccagtttaaaagttccaacattgcgaagaaagaactcagaaaagaattgatggatctgggctttaaagtccgctatataagcgaaaattacaagatgatggcgatcgaaggtacagccactcttcagggggtgaatcctctgcaagtttgggcgtataatatgattaaagctccggaagcgtgggctattacgggcggatccctgagcgttaaagtagcagtcctggatagcgggatcgaccataatcacccatccttggccaacttcgtgaatactaatcttggccgctcgtttgttggaggaaacaccatggatgttcaaggtcatggcacacatgttgctggcacgattgcatcttatgggccggtaagcggagtgatgcagagtgcgacactgatcccggtcaaagtgctcgataattctggcagcgggtccctttacggtattacgcagggcatattgtatgccgccgacatcgatgcagacgtcattaacatgtctctgggtggaggaggctataatcagggcatggatgaggctactcaaacagcagttgctatgggaaccattgtagtagcagcgactggcaatgatggtgcatcgtcgatcagttatcctgctgcctacagcagcgtcattgcggtgggatctgtggaccaaaatcgtgttcgatcctcgttttctaactatggatctgggcttgaactgatggcaccgggcagcaacatctacagtacgtatcctaatggcagatatcgcacgttgagtggtacaagcatggctactccgcacgttgcgggcgtagctgggctcattcgcgcagccaacccagacataagtgtcgcgcaagcccgtcagattctgcgggataccgcgcaagaagcaggatcgttcacacagtacggctatggaatcgtcgatgctcatgccgccgttgttgcggcatccggtggttcgggcggc

SEQ ID NO: 1650 - protein, 413 aa, synthetic construct
  REGION 1..413: note = Variant of serine peptidase from Bacillus sinesaloumensis
MADQASQANGNQDVIEGELIVSVEPKNGKPDVSIQSAQSVTGQEDVLKSKGFTIVDTLHVEDSSVKPLVSKNFNKKVVEKMGLVYLVQYSPDQFKSSNIAKKELRKELMDLGFKVRYISENYKMMAIEGTATLQGVNPLQVWAYNMIKAPEAWAITGGSLSVKVAVLDSGIDHNHPSLANFVNTNLGRSFVGGNTMDVQGHGTHVAGTIASYGPVSGVMQSATLIPVKVLDNSGSGSLYGITQGILYAADIDADVINMSLGGGGYNQGMDEATQTAVAMGTIVVAATGNDGASSISYPAAYSSVIAVGSVDQNRVRSSFSNYGSGLELMAPGSNIYSTYPNGRYRTLSGTSMATPHVAGVAGLIRAANPDISVAQARQILRDTAQEAGSFTQYGYGIVDAHAAVVAASGGSGG

SEQ ID NO: 1651 - DNA, 1239 bp, synthetic construct
  misc_feature 1..1239: note = Variant of serine peptidase from Bacillus sinesaloumensis
  source 1..1239: mol_type = other DNA
atggcagatcaagctagtcaagctaatggaaaccaggacgtcattgaaggcgagctgatcgtttcagtggaaccgaagaacggtaaacctgatgtgagcattcaaagtgcacaatccgtaacagggcaggaagacgtccttaaatcgaaaggctttacgatcgttgataccttgcatgtagaggatagcagcgtcaagccactcgtctcgaagaatttcaataagaaagtggtggagaagatgggactggtgtatcttgttcaatactctccggaccagtttaaaagttccaacattgcgaagaaagaactcagaaaagaattgatggatctgggctttaaagtccgctatataagcgaaaattacaagatgatggcgatcgaaggtacagccactcttcagggggtgaatcctctgcaagtttgggcgtatgaaatgattaaagctccggaagcgtgggctattacgggcggatccctgagcgttaaagtagcagtcctggataccgggatcgaccataatcacccatccttggccaacttcgtgaatactaatcttggccgctcgtttgttggaggaaacaccatggatgttcaaggtcatggcacacatgttgctggcacgattgcatcttatggggtagtaagcggagtgatgcagcaggcgacactgatcccggtcaaagtgctcgataattctggcagcgggtccctttacggtattacgcagggcatattgtatgccgccgacatcgatgcagacgtcatcaacatgtctctgggtggaggaggctataatcagggcatggatgaggctctgcaaacagcagttgctatgggaaccattgtagtagcagcgactggcaatgatggtgcatcgtcgatcagttatcctgctgcctacagcagcgtcattgcggtgggatctgtggaccaaaatcgtgttcgatcctcgttttctaactatggatctgggcttgaactgatggcaccgggcagcaacatctacagtacgtatcctaatggcagatatcgcacgttgagtggtacaagcatggctactccgcacgttgcgggcgtagctgggctcattcgcgcagccaacccagacatagtggtcgcgcaagcccgtcagattctgcgggataccgcgcaagaagcaggatcgttcacacagtacggctatggaatcgtcgatgctcatgccgccgttgttgcggcatccggtggttcgggcggc

SEQ ID NO: 1652 - protein, 413 aa, synthetic construct
  REGION 1..413: note = Variant of serine peptidase from Bacillus sinesaloumensis
MADQASQANGNQDVIEGELIVSVEPKNGKPDVSIQSAQSVTGQEDVLKSKGFTIVDTLHVEDSSVKPLVSKNFNKKVVEKMGLVYLVQYSPDQFKSSNIAKKELRKELMDLGFKVRYISENYKMMAIEGTATLQGVNPLQVWAYEMIKAPEAWAITGGSLSVKVAVLDTGIDHNHPSLANFVNTNLGRSFVGGNTMDVQGHGTHVAGTIASYGVVSGVMQQATLIPVKVLDNSGSGSLYGITQGILYAADIDADVINMSLGGGGYNQGMDEALQTAVAMGTIVVAATGNDGASSISYPAAYSSVIAVGSVDQNRVRSSFSNYGSGLELMAPGSNIYSTYPNGRYRTLSGTSMATPHVAGVAGLIRAANPDIVVAQARQILRDTAQEAGSFTQYGYGIVDAHAAVVAASGGSGG

SEQ ID NO: 1653 - DNA, 1239 bp, synthetic construct
  misc_feature 1..1239: note = Variant of serine peptidase from Bacillus sinesaloumensis
  source 1..1239: mol_type = other DNA
atggcagatcaagctagtcaagctaatggaaaccaggacgtcattgaaggcgagctgatcgtttcagtggaaccgaagaacggtaaacctgatgtgagcattcaaagtgcacaatccgtaacagggcaggaagacgtccttaaatcgaaaggctttacgatcgttgataccttgcatgtagaggatagcagcgtcaagccactcgtctcgaagaatttcaataagaaagtggtggagaagatgggactggtgtatcttgttcaatactctccggaccagtttaaaagttccaacattgcgaagaaagaactcagaaaagaattgatggatctgggctttaaagtccgctatataagcgaaaattacaagatgatggcgatcgaaggtacagccactcttcagggggtgaatcctctgcaagtttgggcgtatgaaatgattaaagctccggaagcgtgggctattacgggcggatccctgagcgttaaagtagcagtcctggataccgggatcgaccataatcacccatccttggccaacttcgtgaatactaatcttggccgctcgtttgttggaggaaacaccatggatgttcaaggtcatggcacacatgttgctggcacgattgcatcttatgggccagtaagcggagtgatgcagcaggcgacactgatcccggtcaaagtgctcgataattctggcagcgggtccctttacggtattacgcagggcatattgtatgccgccgacatcgatgcagacgtcattaacatgtctctgggtgggggaggctataatcagggcatggatgaggctactcaaacagcagttgctatgggaaccattgtagtagcagcgactggcaatgatggtgcatcgtcgatcagttatcctgctgcctacagcagcgtcattgcggtgggatctgtggaccaaaatcgtgttcgatcctcgttttctaactatggatctgggcttgaactgatggcaccgggcagcaacatctacagtacgtatcctaatggcagatatcgcagcttgagtggtacaagcatggctactccgcacgttgcgggcgtagctgggctcattcgcgcagccaacccagacataagtgtcgcgcaagcccgtcagattctgcgggataccgcgcaagaagcaggatcgttcacacagtacggctatggaatcgtcgatgctcatgccgccgttgttgcggcatccggtggttcgggcggc

SEQ ID NO: 1654 - protein, 413 aa, synthetic construct
  REGION 1..413: note = Variant of serine peptidase from Bacillus sinesaloumensis
MADQASQANGNQDVIEGELIVSVEPKNGKPDVSIQSAQSVTGQEDVLKSKGFTIVDTLHVEDSSVKPLVSKNFNKKVVEKMGLVYLVQYSPDQFKSSNIAKKELRKELMDLGFKVRYISENYKMMAIEGTATLQGVNPLQVWAYEMIKAPEAWAITGGSLSVKVAVLDTGIDHNHPSLANFVNTNLGRSFVGGNTMDVQGHGTHVAGTIASYGPVSGVMQQATLIPVKVLDNSGSGSLYGITQGILYAADIDADVINMSLGGGGYNQGMDEATQTAVAMGTIVVAATGNDGASSISYPAAYSSVIAVGSVDQNRVRSSFSNYGSGLELMAPGSNIYSTYPNGRYRSLSGTSMATPHVAGVAGLIRAANPDISVAQARQILRDTAQEAGSFTQYGYGIVDAHAAVVAASGGSGG

SEQ ID NO: 1655 - DNA, 1239 bp, synthetic construct
  misc_feature 1..1239: note = Variant of serine peptidase from Bacillus sinesaloumensis
  source 1..1239: mol_type = other DNA
atggcagatcaagctagtcaagctaatggaaaccaggacgtcattgaaggcgagctgatcgtttcagtggaaccgaagaacggtaaacctgatgtgagcattcaaagtgcacaatccgtaacagggcaggaagacgtccttaaatcgaaaggctttacgatcgttgataccttgcatgtagaggatagcagcgtcaagccactcgtctcgaagaatttcaataagaaagtggtggagaagatgggactggtgtatcttgttcaatactctccggaccagtttaaaagttccaacattgcgaagaaagaactcagaaaagaattgatggatctgggctttaaagtccgctatataagcgaaaattacaagatgatggcgatcgaaggtacagccactcttcagggggtgaatcctctgcaagtttgggcgtataatatgattaaagctccggaagcgtgggctattacgggcggatccctgagcgttaaagtagcagtcctggataccgggatcgaccataatcacccatccttggccaacttcgtgaatactaatcttggccgctcgtttgttggaggaaacaccatggatgttcaaggtcatggcacacatgttgctggcacgattgcatcttatgggccagtaagcggagtgatgcagagtgcgacactgatcccggtcaaagtgctcgataattctggcagcgggtccctttacggtattacgctgggcatattgtatgccgccgacatcgatgcagacgtcattaacatgtctctgggtgggggaggctataatcagggcatggatgaggctctgcaaacagcagttgctatgggaaccattgtagtagcagcgactggcaatgatggtgcatcgtcgatcagttatcctgctgcctacagcagcgtcattgcggtgggatctgtggaccaaaatcgtgttcgatcctcgttttctaactatggatctgggcttgaagtgatggcaccgggcagcaacatctacagtacgtatcctaatggcagatatcgcacgttgagtggtacaagcatggctactccgcacgttgcgggcgtagctgggctcattcgcgcagccaacccagacataagtgtcgcgcaagcccgtcagattctgcgggataccgcgcaagaagcaggatcgttcacacagtacggctatggaatcgtcgatgctcatgccgccgttgttcgtgcatccggtggttcgggcggc

SEQ ID NO: 1656 - protein, 413 aa, synthetic construct
  REGION 1..413: note = Variant of serine peptidase from Bacillus sinesaloumensis
MADQASQANGNQDVIEGELIVSVEPKNGKPDVSIQSAQSVTGQEDVLKSKGFTIVDTLHVEDSSVKPLVSKNFNKKVVEKMGLVYLVQYSPDQFKSSNIAKKELRKELMDLGFKVRYISENYKMMAIEGTATLQGVNPLQVWAYNMIKAPEAWAITGGSLSVKVAVLDTGIDHNHPSLANFVNTNLGRSFVGGNTMDVQGHGTHVAGTIASYGPVSGVMQSATLIPVKVLDNSGSGSLYGITLGILYAADIDADVINMSLGGGGYNQGMDEALQTAVAMGTIVVAATGNDGASSISYPAAYSSVIAVGSVDQNRVRSSFSNYGSGLEVMAPGSNIYSTYPNGRYRTLSGTSMATPHVAGVAGLIRAANPDISVAQARQILRDTAQEAGSFTQYGYGIVDAHAAVVRASGGSGG

SEQ ID NO: 1657 - DNA, 1239 bp, synthetic construct
  misc_feature 1..1239: note = Variant of serine peptidase from Bacillus sinesaloumensis
  source 1..1239: mol_type = other DNA
atggcagatcaagctagtcaagctaatggaaaccaggacgtcattgaaggcgagctgatcgtttcagtggaaccgaagaacggtaaacctgatgtgagcattcaaagtgcacaatccgtaacagggcaggaagacgtccttaaatcgaaaggctttacgatcgttgataccttgcatgtagaggatagcagcgtcaagccactcgtctcgaagaatttcaataagaaagtggtggagaagatgggactggtgtatcttgttcaatactctccggaccagtttaaaagttccaacattgcgaagaaagaactcagaaaagaattgatggatctgggctttaaagtccgctatataagcgaaaattacaagatgatggcgatcgaaggtacagccactcttcagggggtgaatcctctgcaagtttgggcgtatgaaatgattaaagctccggaagcgtgggctattacgggcggatccctgagcgttaaagtagcagtcctggatagcgggatcgaccataatcacccatccttggccaacttcgtgaatactaatcttggccgctcgtttgttggaggaaacaccatggatgttcaaggtcatggcacacatgttgctggcacgattgcatcttatgggccggtaagcggagtgatgcagtcggcgacactgatcccggtcaaagtgctcgataattctggcagcgggtccctttacggtattacgcagggcatattgtatgccgccgacatcgatgcagacgtcattaacatgtctctgggtggaggaggctataatcagggcatggatgaggctctgcaaacagcagttgctatgggaaccattgtagtagcagcgactggcaatgatggtgcatcgtcgatcagttatcctgctgcctacagcagcgtcattgcggtgggatctgtggaccaaaatcgtgttcgatcctcgttttctaactatggatctgggcttgaagtgatggcaccgggcagcaacatctacagtacgtatcctaatggcagatatcgcagcttgagtggtacaagcatggctactccgcacgttgcgggcgtagctgggctcattcgcgcagccaacccagacatagttgtcgcgcaagcccgtcagattctgcgggataccgcgcaagaagcaggatcgttcacacagtacggctatggaatcgtcgatgctcatgccgccgttgttgcggcatccggtggttcgggcggc

SEQ ID NO: 1658 - protein, 413 aa, synthetic construct
  REGION 1..413: note = Variant of serine peptidase from Bacillus sinesaloumensis
MADQASQANGNQDVIEGELIVSVEPKNGKPDVSIQSAQSVTGQEDVLKSKGFTIVDTLHVEDSSVKPLVSKNFNKKVVEKMGLVYLVQYSPDQFKSSNIAKKELRKELMDLGFKVRYISENYKMMAIEGTATLQGVNPLQVWAYEMIKAPEAWAITGGSLSVKVAVLDSGIDHNHPSLANFVNTNLGRSFVGGNTMDVQGHGTHVAGTIASYGPVSGVMQSATLIPVKVLDNSGSGSLYGITQGILYAADIDADVINMSLGGGGYNQGMDEALQTAVAMGTIVVAATGNDGASSISYPAAYSSVIAVGSVDQNRVRSSFSNYGSGLEVMAPGSNIYSTYPNGRYRSLSGTSMATPHVAGVAGLIRAANPDIVVAQARQILRDTAQEAGSFTQYGYGIVDAHAAVVAASGGSGG

SEQ ID NO: 1659 - DNA, 1239 bp, synthetic construct
  misc_feature 1..1239: note = Variant of serine peptidase from Bacillus sinesaloumensis
  source 1..1239: mol_type = other DNA
atggcagatcaagctagtcaagctaatggaaaccaggacgtcattgaaggcgagctgatcgtttcagtggaaccgaagaacggtaaacctgatgtgagcattcaaagtgcacaatccgtaacagggcaggaagacgtccttaaatcgaaaggctttacgatcgttgataccttgcatgtagaggatagcagcgtcaagccactcgtctcgaagaatttcaataagaaagtggtggagaagatgggactggtgtatcttgttcaatactctccggaccagtttaaaagttccaacattgcgaagaaagaactcagaaaagaattgatggatctgggctttaaagtccgctatataagcgaaaattacaagatgatggcgatcgaaggtacagccactcttcagggggtgaatcctctgcaagtttgggcgtataatatgattaaagctccggaagcgtgggctattacgggcggatccctgagcgttaaagtagcagtcctggatacagggatcgaccataatcacccatccttggccaacttcgtgaatactaatcttggccgctcgtttgttggaggaaacaccatggatgttcaaggtcatggcacacatgttgctggcacgattgcatcttatgggccggtaagcggagtgatgcagagtgcgacactgatcccggtcaaagtgctcgataattctggcagcgggtccctttacggtattacgcagggcatattgtatgccgccgacatcgatgcagacgtcattaacatgtctctgggtggaggaggctataatcagggcatggatgaggctactcaaacagcagttgctatgggaaccattgtagtagcagcgactggcaatgatggtgcatcgtcgatcagttatcctgctgcctacagcagcgtcattgcggtgggatctgtggaccaaaatcgtgttcgatcctcgttttctaactatggatctgggcttgaagtgatggcaccgggcagcaacatctacagtacgtatcctaatggcagatatcgcacgttgagtggtacaagcatggctactccgcacgttgcgggcgtagctgggctcattcgcgcagccaacccagacatagttgtcgcgcaagcccgtcagattctgcgggataccgcgcaagaagcaggatcgttcacacagtacggctatggaatcgtcgatgctcatgccgccgttgttgcggcatccggtggttcgggcggc

SEQ ID NO: 1660 - protein, 413 aa, synthetic construct
  REGION 1..413: note = Variant of serine peptidase from Bacillus sinesaloumensis
MADQASQANGNQDVIEGELIVSVEPKNGKPDVSIQSAQSVTGQEDVLKSKGFTIVDTLHVEDSSVKPLVSKNFNKKVVEKMGLVYLVQYSPDQFKSSNIAKKELRKELMDLGFKVRYISENYKMMAIEGTATLQGVNPLQVWAYNMIKAPEAWAITGGSLSVKVAVLDTGIDHNHPSLANFVNTNLGRSFVGGNTMDVQGHGTHVAGTIASYGPVSGVMQSATLIPVKVLDNSGSGSLYGITQGILYAADIDADVINMSLGGGGYNQGMDEATQTAVAMGTIVVAATGNDGASSISYPAAYSSVIAVGSVDQNRVRSSFSNYGSGLEVMAPGSNIYSTYPNGRYRTLSGTSMATPHVAGVAGLIRAANPDIVVAQARQILRDTAQEAGSFTQYGYGIVDAHAAVVAASGGSGG

SEQ ID NO: 1661 - DNA, 1239 bp, synthetic construct
  misc_feature 1..1239: note = Variant of serine peptidase from Bacillus sinesaloumensis
  source 1..1239: mol_type = other DNA
atggcagatcaagctagtcaagctaatggaaaccaggacgtcattgaaggcgagctgatcgtttcagtggaaccgaagaacggtaaacctgatgtgagcattcaaagtgcacaatccgtaacagggcaggaagacgtccttaaatcgaaaggctttacgatcgttgataccttgcatgtagaggatagcagcgtcaagccactcgtctcgaagaatttcaataagaaagtggtggagaagatgggactggtgtatcttgttcaatactctccggaccagtttaaaagttccaacattgcgaagaaagaactcagaaaagaattgatggatctgggctttaaagtccgctatataagcgaaaattacaagatgatggcgatcgaaggtacagccactcttcagggggtgaatcctctgcaagtttgggcgtataatatgattaaagctccggaagcgtgggctattacgggcggatccctgagcgttaaagtagcagtcctggatagcgggatcgaccataatcacccatccttggccaacttcgtgaatactaatcttggccgctcgtttgttggaggaaacaccatggatgttcaaggtcatggcacacatgttgctggcacgattgcatcttatgggccggtaagcggagtgatgcagtcggcgacactgatcccggtcaaagtgctcgataattctggcagcgggtccctttacggtattacgcagggcatattgtatgccgccgacatcgatgcagacgtcattaacatgtctctgggtggaggaggctataatcagggcatggatgaggctctgcaaacagcagttgctatgggaaccattgtagtagcagcgactggcaatgatggtgcatcgtcgatcagttatcctgctgcctacagcagcgtcattgcggtgggatctgtggaccaaaatcgtgttcgatcctcgttttctaactatggatctgggcttgaactgatggcaccgggcagcaacatctacagtacgtatcctaatggcagatatcgcacgttgagtggtacaagcatggctactccgcacgttgcgggcgtagctgggctcattcgcgcagccaacccagacataagtgtcgcgcaagcccgtcagattctgcgggataccgcgcaagaagcaggatcgttcacacagtacggctatggaatcgtcgatgctcatgccgccgttgttgcggcatccggtggttcgggcggc

SEQ ID NO: 1662 - protein, 413 aa, synthetic construct
  REGION 1..413: note = Variant of serine peptidase from Bacillus sinesaloumensis
MADQASQANGNQDVIEGELIVSVEPKNGKPDVSIQSAQSVTGQEDVLKSKGFTIVDTLHVEDSSVKPLVSKNFNKKVVEKMGLVYLVQYSPDQFKSSNIAKKELRKELMDLGFKVRYISENYKMMAIEGTATLQGVNPLQVWAYNMIKAPEAWAITGGSLSVKVAVLDSGIDHNHPSLANFVNTNLGRSFVGGNTMDVQGHGTHVAGTIASYGPVSGVMQSATLIPVKVLDNSGSGSLYGITQGILYAADIDADVINMSLGGGGYNQGMDEALQTAVAMGTIVVAATGNDGASSISYPAAYSSVIAVGSVDQNRVRSSFSNYGSGLELMAPGSNIYSTYPNGRYRTLSGTSMATPHVAGVAGLIRAANPDISVAQARQILRDTAQEAGSFTQYGYGIVDAHAAVVAASGGSGG

SEQ ID NO: 1663 - DNA, 1239 bp, synthetic construct
  misc_feature 1..1239: note = Variant of serine peptidase from Bacillus sinesaloumensis
  source 1..1239: mol_type = other DNA
atggcagatcaagctagtcaagctaatggaaaccaggacgtcattgaaggcgagctgatcgtttcagtggaaccgaagaacggtaaacctgatgtgagcattcaaagtgcacaatccgtaacagggcaggaagacgtccttaaatcgaaaggctttacgatcgttgataccttgcatgtagaggatagcagcgtcaagccactcgtctcgaagaatttcaataagaaagtggtggagaagatgggactggtgtatcttgttcaatactctccggaccagtttaaaagttccaacattgcgaagaaagaactcagaaaagaattgatggatctgggctttaaagtccgctatataagcgaaaattacaagatgatggcgatcgaaggtacagccactcttcagggggtgaatcctctgcaagtttgggcgtatgaaatgattaaagctccggaagcgtgggctattacgggcggatccctgagcgttaaagtagcagtcctggataccgggatcgaccataatcacccatccttggccaacttcgtgaatactaatcttggccgctcgtttgttggaggaaacaccatggatgttcaaggtcatggcacacatgttgctggcacgattgcatcttatgggccagtaagcggagtgatgcagcaggcgacactgatcccggtcaaagtgctcgataattctggcagcgggtccctttacggtattacgcagggcatattgtatgccgccgacatcgatgcagacgtcattaacatgtctctgggtggaggaggctataatcagggcatggatgaggctactcaaacagcagttgctatgggaaccattgtagtagcagcgactggcaatgatggtgcatcgtcgatcagttatcctgctgcctacagcagcgtcattgcggtgggatctgtggaccaaaatcgtgttcgatcctcgttttctaactatggatctgggcttgaagtgatggcaccgggcagcaacatctacagtacgtatcctaatggcagatatcgcaccttgagtggtacaagcatggctactccgcacgttgcgggcgtagctgggctcattcgcgcagccaacccagacatagttgtcgcgcaagcccgtcagattctgcgggataccgcgcaagaagcaggatcgttcacacagtacggctatggaatcgtcgatgctcatgccgccgttgttgctgcatccggtggttcgggcggc

SEQ ID NO: 1664 - protein, 413 aa, synthetic construct
  REGION 1..413: note = Variant of serine peptidase from Bacillus sinesaloumensis
MADQASQANGNQDVIEGELIVSVEPKNGKPDVSIQSAQSVTGQEDVLKSKGFTIVDTLHVEDSSVKPLVSKNFNKKVVEKMGLVYLVQYSPDQFKSSNIAKKELRKELMDLGFKVRYISENYKMMAIEGTATLQGVNPLQVWAYEMIKAPEAWAITGGSLSVKVAVLDTGIDHNHPSLANFVNTNLGRSFVGGNTMDVQGHGTHVAGTIASYGPVSGVMQQATLIPVKVLDNSGSGSLYGITQGILYAADIDADVINMSLGGGGYNQGMDEATQTAVAMGTIVVAATGNDGASSISYPAAYSSVIAVGSVDQNRVRSSFSNYGSGLEVMAPGSNIYSTYPNGRYRTLSGTSMATPHVAGVAGLIRAANPDIVVAQARQILRDTAQEAGSFTQYGYGIVDAHAAVVAASGGSGG

SEQ ID NO: 1665 - DNA, 1239 bp, synthetic construct
  misc_feature 1..1239: note = Variant of serine peptidase from Bacillus sinesaloumensis
  source 1..1239: mol_type = other DNA
atggcagatcaagctagtcaagctaatggaaaccaggacgtcattgaaggcgagctgatcgtttcagtggaaccgaagaacggtaaacctgatgtgagcattcaaagtgcacaatccgtaacagggcaggaagacgtccttaaatcgaaaggctttacgatcgttgataccttgcatgtagaggatagcagcgtcaagccactcgtctcgaagaatttcaataagaaagtggtggagaagatgggactggtgtatcttgttcaatactctccggaccagtttaaaagttccaacattgcgaagaaagaactcagaaaagaattgatggatctgggctttaaagtccgctatataagcgaaaattacaagatgatggcgatcgaaggtacagccactcttcagggggtgaatcctctgcaagtttgggcgtataatatgattaaagctccggaagcgtgggctattacgggcggatccctgagcgttaaagtagcagtcctggatagcgggatcgaccataatcacccatccttggccaacttcgtgaatactaatcttggccgctcgtttgttggaggaaacaccatggatgttcaaggtcatggcacacatgttgctggcacgattgcatcttatggggtagtaagcggagtgatgcagagtgcgacactgatcccggtcaaagtgctcgataattctggcagcgggtccctttacggtattacgcagggcatattgtatgccgccgacatcgatgcagacgtcattaacatgtctctgggtggaggaggctataatcagggcatggatgaggctctgcaaacagcagttgctatgggaaccattgtagtagcagcgactggcaatgatggtgcatcgtcgatcagttatcctgctgcctacagcagcgtcattgcggtgggatctgtggaccaaaatcgtgttcgatcctcgttttctaactatggatctgggcttgaactgatggcaccgggcagcaacatctacagtacgtatcctaatggcagatatcgcacgttgagtggtacaagcatggctactccgcacgttgcgggcgtagctgggctcattcgcgcagccaacccagacatagtggtcgcgcaagcccgtcagattctgcgggataccgcgcaagaagcaggatcgttcacacagtacggctatggaatcgtcgatgctcatgccgccgttgttgctgcatccggtggttcgggcggc

SEQ ID NO: 1666 - protein, 413 aa, synthetic construct
  REGION 1..413: note = Variant of serine peptidase from Bacillus sinesaloumensis
MADQASQANGNQDVIEGELIVSVEPKNGKPDVSIQSAQSVTGQEDVLKSKGFTIVDTLHVEDSSVKPLVSKNFNKKVVEKMGLVYLVQYSPDQFKSSNIAKKELRKELMDLGFKVRYISENYKMMAIEGTATLQGVNPLQVWAYNMIKAPEAWAITGGSLSVKVAVLDSGIDHNHPSLANFVNTNLGRSFVGGNTMDVQGHGTHVAGTIASYGVVSGVMQSATLIPVKVLDNSGSGSLYGITQGILYAADIDADVINMSLGGGGYNQGMDEALQTAVAMGTIVVAATGNDGASSISYPAAYSSVIAVGSVDQNRVRSSFSNYGSGLELMAPGSNIYSTYPNGRYRTLSGTSMATPHVAGVAGLIRAANPDIVVAQARQILRDTAQEAGSFTQYGYGIVDAHAAVVAASGGSGG

SEQ ID NO: 1667 - DNA, 1239 bp, synthetic construct
  misc_feature 1..1239: note = Variant of serine peptidase from Bacillus sinesaloumensis
  source 1..1239: mol_type = other DNA
atggcagatcaagctagtcaagctaatggaaaccaggacgtcattgaaggcgagctgatcgtttcagtggaaccgaagaacggtaaacctgatgtgagcattcaaagtgcacaatccgtaacagggcaggaagacgtccttaaatcgaaaggctttacgatcgttgataccttgcatgtagaggatagcagcgtcaagccactcgtctcgaagaatttcaataagaaagtggtggagaagatgggactggtgtatcttgttcaatactctccggaccagtttaaaagttccaacattgcgaagaaagaactcagaaaagaattgatggatctgggctttaaagtccgctatataagcgaaaattacaagatgatggcgatcgaaggtacagccactcttcagggggtgaatcctctgcaagtttgggcgtataatatgattaaagctccggaagcgtgggctattacgggcggatccctgagcgttaaagtagcagtcctggataccgggatcgaccataatcacccatccttggccaacttcgtgaatactaatcttggccgctcgtttgttggaggaaacaccatggatgttcaaggtcatggcacacatgttgctggcacgattgcatcttatgggccggtaagcggagtgatgcagcaggcgacactgatcccggtcaaagtgctcgataattctggcagcgggtccctttacggtattacgcagggcatattgtatgccgccgacatcgatgcagacgtcattaacatgtctctgggtggaggaggctataatcagggcatggatgaggctctgcaaacagcagttgctatgggaaccattgtagtagcagcgactggcaatgatggtgcatcgtcgatcagttatcctgctgcctacagcagcgtcattgcggtgggatctgtggaccaaaatcgtgttcgatcctcgttttctaactatggatctgggcttgaagtgatggcaccgggcagcaacatctacagtacgtatcctaatggcagatatcgcacgttgagtggtacaagcatggctactccgcacgttgcgggcgtagctgggctcattcgcgcagccaacccagacatagtggtcgcgcaagcccgtcagattctgcgggataccgcgcaagaagcaggatcgttcacacagtacggctatggaatcgtcgatgctcatgccgccgttgttgctgcatccggtggttcgggcggc

SEQ ID NO: 1668 - protein, 413 aa, synthetic construct
  REGION 1..413: note = Variant of serine peptidase from Bacillus sinesaloumensis
MADQASQANGNQDVIEGELIVSVEPKNGKPDVSIQSAQSVTGQEDVLKSKGFTIVDTLHVEDSSVKPLVSKNFNKKVVEKMGLVYLVQYSPDQFKSSNIAKKELRKELMDLGFKVRYISENYKMMAIEGTATLQGVNPLQVWAYNMIKAPEAWAITGGSLSVKVAVLDTGIDHNHPSLANFVNTNLGRSFVGGNTMDVQGHGTHVAGTIASYGPVSGVMQQATLIPVKVLDNSGSGSLYGITQGILYAADIDADVINMSLGGGGYNQGMDEALQTAVAMGTIVVAATGNDGASSISYPAAYSSVIAVGSVDQNRVRSSFSNYGSGLEVMAPGSNIYSTYPNGRYRTLSGTSMATPHVAGVAGLIRAANPDIVVAQARQILRDTAQEAGSFTQYGYGIVDAHAAVVAASGGSGG

SEQ ID NO: 1669 - DNA, 1239 bp, synthetic construct
  misc_feature 1..1239: note = Variant of serine peptidase from Bacillus sinesaloumensis
  source 1..1239: mol_type = other DNA
atggcagatcaagctagtcaagctaatggaaaccaggacgtcattgaaggcgagctgatcgtttcagtggaaccgaagaacggtaaacctgatgtgagcattcaaagtgcacaatccgtaacagggcaggaagacgtccttaaatcgaaaggctttacgatcgttgataccttgcatgtagaggatagcagcgtcaagccactcgtctcgaagaatttcaataagaaagtggtggagaagatgggactggtgtatcttgttcaatactctccggaccagtttaaaagttccaacattgcgaagaaagaactcagaaaagaattgatggatctgggctttaaagtccgctatataagcgaaaattacaagatgatggcgatcgaaggtacagccactcttcagggggtgaatcctctgcaagtttgggcgtataatatgattaaagctccggaagcgtgggctattacgggcggatccctgagcgttaaagtagcagtcctggatacagggatcgaccataatcacccatccttggccaacttcgtgaatactaatcttggccgctcgtttgttggaggaaacaccatggatgttcaaggtcatggcacacatgttgctggcacgattgcatcttatgggccggtaagcggagtgatgcagcaggcgacactgatcccggtcaaagtgctcgataattctggcagcgggtccctttacggtattacgcagggcatattgtatgccgccgacatcgatgcagacgtcattaacatgtctctgggtggaggaggctataatcagggcatggatgaggctactcaaacagcagttgctatgggaaccattgtagtagcagcgactggcaatgatggtgcatcgtcgatcagttatcctgctgcctacagcagcgtcattgcggtgggatctgtggaccaaaatcgtgttcgatcctcgttttctaactatggatctgggcttgaactgatggcaccgggcagcaacatctacagtacgtatcctaatggcagatatcgcacgttgagtggtacaagcatggctactccgcacgttgcgggcgtagctgggctcattcgcgcagccaacccagacatagtggtcgcgcaagcccgtcagattctgcgggataccgcgcaagaagcaggatcgttcacacagtacggctatggaatcgtcgatgctcatgccgccgttgttgctgcatccggtggttcgggcggc

SEQ ID NO: 1670 - protein, 413 aa, synthetic construct
  REGION 1..413: note = Variant of serine peptidase from Bacillus sinesaloumensis
MADQASQANGNQDVIEGELIVSVEPKNGKPDVSIQSAQSVTGQEDVLKSKGFTIVDTLHVEDSSVKPLVSKNFNKKVVEKMGLVYLVQYSPDQFKSSNIAKKELRKELMDLGFKVRYISENYKMMAIEGTATLQGVNPLQVWAYNMIKAPEAWAITGGSLSVKVAVLDTGIDHNHPSLANFVNTNLGRSFVGGNTMDVQGHGTHVAGTIASYGPVSGVMQQATLIPVKVLDNSGSGSLYGITQGILYAADIDADVINMSLGGGGYNQGMDEATQTAVAMGTIVVAATGNDGASSISYPAAYSSVIAVGSVDQNRVRSSFSNYGSGLELMAPGSNIYSTYPNGRYRTLSGTSMATPHVAGVAGLIRAANPDIVVAQARQILRDTAQEAGSFTQYGYGIVDAHAAVVAASGGSGG

SEQ ID NO: 1671 - DNA, 1239 bp, synthetic construct
  misc_feature 1..1239: note = Variant of serine peptidase from Bacillus sinesaloumensis
  source 1..1239: mol_type = other DNA
atggcagatcaagctagtcaagctaatggaaaccaggacgtcattgaaggcgagctgatcgtttcagtggaaccgaagaacggtaaacctgatgtgagcattcaaagtgcacaatccgtaacagggcaggaagacgtccttaaatcgaaaggctttacgatcgttgataccttgcatgtagaggatagcagcgtcaagccactcgtctcgaagaatttcaataagaaagtggtggagaagatgggactggtgtatcttgttcaatactctccggaccagtttaaaagttccaacattgcgaagaaagaactcagaaaagaattgatggatctgggctttaaagtccgctatataagcgaaaattacaagatgatggcgatcgaaggtacagccactcttcagggggtgaatcctctgcaagtttgggcgtatgaaatgattaaagctccggaagcgtgggctattacgggcggatccctgagcgttaaagtagcagtcctggataccgggatcgaccataatcacccatccttggccaacttcgtgaatactaatcttggccgctcgtttgttggaggaaacaccatggatgttcaaggtcatggcacacatgttgctggcacgattgcatcttatgggccagtaagcggagtgatgcagagtgcgacactgatcccggtcaaagtgctcgataattctggcagcgggtccctttacggtattacgcagggcatattgtatgccgccgacatcgatgcagacgtcatcaacatgtctctgggtgggggaggctataatcagggcatggatgaggctactcaaacagcagttgctatgggaaccattgtagtagcagcgactggcaatgatggtgcatcgtcgatcagttatcctgctgcctacagcagcgtcattgcggtgggatctgtggaccaaaatcgtgttcgatcctcgttttctaactatggatctgggcttgaagtgatggcaccgggcagcaacatctacagtacgtatcctaatggcagatatcgcacgttgagtggtacaagcatggctactccgcacgttgcgggcgtagctgggctcattcgcgcagccaacccagacatagttgtcgcgcaagcccgtcagattctgcgggataccgcgcaagaagcaggatcgttcacacagtacggctatggaatcgtcgatgctcatgccgccgttgttgcggcatccggtggttcgggcggc

SEQ ID NO: 1672 - protein, 413 aa, synthetic construct
  REGION 1..413: note = Variant of serine peptidase from Bacillus sinesaloumensis
MADQASQANGNQDVIEGELIVSVEPKNGKPDVSIQSAQSVTGQEDVLKSKGFTIVDTLHVEDSSVKPLVSKNFNKKVVEKMGLVYLVQYSPDQFKSSNIAKKELRKELMDLGFKVRYISENYKMMAIEGTATLQGVNPLQVWAYEMIKAPEAWAITGGSLSVKVAVLDTGIDHNHPSLANFVNTNLGRSFVGGNTMDVQGHGTHVAGTIASYGPVSGVMQSATLIPVKVLDNSGSGSLYGITQGILYAADIDADVINMSLGGGGYNQGMDEATQTAVAMGTIVVAATGNDGASSISYPAAYSSVIAVGSVDQNRVRSSFSNYGSGLEVMAPGSNIYSTYPNGRYRTLSGTSMATPHVAGVAGLIRAANPDIVVAQARQILRDTAQEAGSFTQYGYGIVDAHAAVVAASGGSGG

SEQ ID NO: 1673 - DNA, 1239 bp, synthetic construct
  misc_feature 1..1239: note = Variant of serine peptidase from Bacillus sinesaloumensis
  source 1..1239: mol_type = other DNA
atggcagatcaagctagtcaagctaatggaaaccaggacgtcattgaaggcgagctgatcgtttcagtggaaccgaagaacggtaaacctgatgtgagcattcaaagtgcacaatccgtaacagggcaggaagacgtccttaaatcgaaaggctttacgatcgttgataccttgcatgtagaggatagcagcgtcaagccactcgtctcgaagaatttcaataagaaagtggtggagaagatgggactggtgtatcttgttcaatactctccggaccagtttaaaagttccaacattgcgaagaaagaactcagaaaagaattgatggatctgggctttaaagtccgctatataagcgaaaattacaagatgatggcgatcgaaggtacagccactcttcagggggtgaatcctctgcaagtttgggcgtataatatgattaaagctccggaagcgtgggctattacgggcggatccctgagcgttaaagtagcagtcctggatacagggatcgaccataatcacccatccttggccaacttcgtgaatactaatcttggccgctcgtttgttggaggaaacaccatggatgttcaaggtcatggcacacatgttgctggcacgattgcatcttatgggaatgtaagcggagtgatgcagagtgcgacactgatcccggtcaaagtgctcgataattctggcagcgggtccctttacggtattacgcagggcatattgtatgccgccgacatcgatgcagacgtcattaacatgtctctgggtggaggaggctataatcagggcatggatgaggctactcaaacagcagttgctatgggaaccattgtagtagcagcgactggcaatgatggtgcatcgtcgatcagttatcctgctgcctacagcagcgtcattgcggtgggatctgtggaccaaaatcgtgttcgatcctcgttttctaactatggatctgggcttgaactgatggcaccgggcagcaacatctacagtacgtatcctaatggcagatatcgcagtttgagtggtacaagcatggctactccgcacgttgcgggcgtagctgggctcattcgcgcagccaacccagacatagtggtcgcgcaagcccgtcagattctgcgggataccgcgcaagaagcaggatcgttcacacagtacggctatggaatcgtcgatgctcatgccgccgttgttgctgcatccggtggttcgggcggc

SEQ ID NO: 1674 - protein, 413 aa, synthetic construct
  REGION 1..413: note = Variant of serine peptidase from Bacillus sinesaloumensis
MADQASQANGNQDVIEGELIVSVEPKNGKPDVSIQSAQSVTGQEDVLKSKGFTIVDTLHVEDSSVKPLVSKNFNKKVVEKMGLVYLVQYSPDQFKSSNIAKKELRKELMDLGFKVRYISENYKMMAIEGTATLQGVNPLQVWAYNMIKAPEAWAITGGSLSVKVAVLDTGIDHNHPSLANFVNTNLGRSFVGGNTMDVQGHGTHVAGTIASYGNVSGVMQSATLIPVKVLDNSGSGSLYGITQGILYAADIDADVINMSLGGGGYNQGMDEATQTAVAMGTIVVAATGNDGASSISYPAAYSSVIAVGSVDQNRVRSSFSNYGSGLELMAPGSNIYSTYPNGRYRSLSGTSMATPHVAGVAGLIRAANPDIVVAQARQILRDTAQEAGSFTQYGYGIVDAHAAVVAASGGSGG

SEQ ID NO: 1675 - DNA, 1239 bp, synthetic construct
  misc_feature 1..1239: note = Variant of serine peptidase from Bacillus sinesaloumensis
  source 1..1239: mol_type = other DNA
atggcagatcaagctagtcaagctaatggaaaccaggacgtcattgaaggcgagctgatcgtttcagtggaaccgaagaacggtaaacctgatgtgagcattcaaagtgcacaatccgtaacagggcaggaagacgtccttaaatcgaaaggctttacgatcgttgataccttgcatgtagaggatagcagcgtcaagccactcgtctcgaagaatttcaataagaaagtggtggagaagatgggactggtgtatcttgttcaatactctccggaccagtttaaaagttccaacattgcgaagaaagaactcagaaaagaattgatggatctgggctttaaagtccgctatataagcgaaaattacaagatgatggcgatcgaaggtacagccactcttcagggggtgaatcctctgcaagtttgggcgtataatatgattaaagctccggaagcgtgggctattacgggcggatccctgagcgttaaagtagcagtcctggatacagggatcgaccataatcacccatccttggccaacttcgtgaatactaatcttggccgctcgtttgttggaggaaacaccatggatgttcaaggtcatggcacacatgttgctggcacgattgcatcttatgggccggtaagcggagtgatgcagagtgcgacactgatcccggtcaaagtgctcgataattctggcagcgggtccctttacggtattacgcagggcatattgtatgccgccgacatcgatgcagacgtcattaacatgtctctgggtggaggaggctataatcagggcatggatgaggctactcaaacagcagttgctatgggaaccattgtagtagcagcgactggcaatgatggtgcatcgtcgatcagttatcctgctgcctacagcagcgtcattgcggtgggatctgtggaccgcaatcgtgttcgatcctcgttttctaactatggatctgggcttgaactgatggcaccgggcagcaacatctacagtacgtatcctaatggcagatatcgcacgttgagtggtacaagcatggctactccgcacgttgcgggcgtagctgggctcattcgcgcagccaacccagacatagtggtcgcgcaagcccgtcagattctgcgggataccgcgcaagaagcaggatcgttcacacagtacggctatggaatcgtcgatgctcatgccgccgttgttgctgcatccggtggttcgggcggc

SEQ ID NO: 1676 - protein, 413 aa, synthetic construct
  REGION 1..413: note = Variant of serine peptidase from Bacillus sinesaloumensis
MADQASQANGNQDVIEGELIVSVEPKNGKPDVSIQSAQSVTGQEDVLKSKGFTIVDTLHVEDSSVKPLVSKNFNKKVVEKMGLVYLVQYSPDQFKSSNIAKKELRKELMDLGFKVRYISENYKMMAIEGTATLQGVNPLQVWAYNMIKAPEAWAITGGSLSVKVAVLDTGIDHNHPSLANFVNTNLGRSFVGGNTMDVQGHGTHVAGTIASYGPVSGVMQSATLIPVKVLDNSGSGSLYGITQGILYAADIDADVINMSLGGGGYNQGMDEATQTAVAMGTIVVAATGNDGASSISYPAAYSSVIAVGSVDRNRVRSSFSNYGSGLELMAPGSNIYSTYPNGRYRTLSGTSMATPHVAGVAGLIRAANPDIVVAQARQILRDTAQEAGSFTQYGYGIVDAHAAVVAASGGSGG

SEQ ID NO: 1677 - DNA, 1239 bp, synthetic construct
  misc_feature 1..1239: note = Variant of serine peptidase from Bacillus sinesaloumensis
  source 1..1239: mol_type = other DNA
atggcagatcaagctagtcaagctaatggaaaccaggacgtcattgaaggcgagctgatcgtttcagtggaaccgaagaacggtaaacctgatgtgagcattcaaagtgcacaatccgtaacagggcaggaagacgtccttaaatcgaaaggctttacgatcgttgataccttgcatgtagaggatagcagcgtcaagccactcgtctcgaagaatttcaataagaaagtggtggagaagatgggactggtgtatcttgttcaatactctccggaccagtttaaaagttccaacattgcgaagaaagaactcagaaaagaattgatggatctgggctttaaagtccgctatataagcgaaaattacaagatgatggcgatcgaaggtacagccactcttcagggggtgaatcctctgcaagtttgggcgtataatatgattaaagctccggaagcgtgggctattacgggcggatccctgagcgttaaagtagcagtcctggatacagggatcgaccataatcacccatccttggccaacttcgtgaatactaatcttggccgctcgtttgttggaggaaacaccatggatgttcaaggtcatggcacacatgttgctggcacgattgcatcttcggggccggtaagcggagtgatgcagagtgcgacactgatcccggtcaaagtgctcgataattctggcagcgggtccctttacggtattacgcaaggcatattgtatgccgcggacatcgatgcagacgtcattaacatgtctctgggtggaggaggctataatcagggcatggatgaggctactcaaacagcagttgctatgggaaccattgtagtagcagcgactggcaatgatggtgcatcgtcgatcagttatcctgctgcctacagcagcgtcattgcggtgggatctgtggaccaaaatcgtgttcgatcctcgttttctaactatggatctgggcttgaactgatggcaccgggcagcaacatctacagtacgtatcctaatggcagatatcgcactttgagtggtacaagcatggctactccgcacgttgcgggcgtagctgggctcattcgcgcagccaacccagacatagtggtcgcgcaagcccgtcagattctgcgggataccgcgcaagaagcaggatcgttcacacagtacggctatggaatcgtcgatgctcatgccgccgttgttgctgcatccggtggttcgggcggc

SEQ ID NO: 1678 - protein, 413 aa, synthetic construct
  REGION 1..413: note = Variant of serine peptidase from Bacillus sinesaloumensis
MADQASQANGNQDVIEGELIVSVEPKNGKPDVSIQSAQSVTGQEDVLKSKGFTIVDTLHVEDSSVKPLVSKNFNKKVVEKMGLVYLVQYSPDQFKSSNIAKKELRKELMDLGFKVRYISENYKMMAIEGTATLQGVNPLQVWAYNMIKAPEAWAITGGSLSVKVAVLDTGIDHNHPSLANFVNTNLGRSFVGGNTMDVQGHGTHVAGTIASSGPVSGVMQSATLIPVKVLDNSGSGSLYGITQGILYAADIDADVINMSLGGGGYNQGMDEATQTAVAMGTIVVAATGNDGASSISYPAAYSSVIAVGSVDQNRVRSSFSNYGSGLELMAPGSNIYSTYPNGRYRTLSGTSMATPHVAGVAGLIRAANPDIVVAQARQILRDTAQEAGSFTQYGYGIVDAHAAVVAASGGSGG

SEQ ID NO: 1679 - DNA, 1239 bp, synthetic construct
  misc_feature 1..1239: note = Variant of serine peptidase from Bacillus sinesaloumensis
  source 1..1239: mol_type = other DNA
atggcagatcaagctagtcaagctaatggaaaccaggacgtcattgaaggcgagctgatcgtttcagtggaaccgaagaacggtaaacctgatgtgagcattcaaagtgcacaatccgtaacagggcaggaagacgtccttaaatcgaaaggctttacgatcgttgataccttgcatgtagaggatagcagcgtcaagccactcgtctcgaagaatttcaataagaaagtggtggagaagatgggactggtgtatcttgttcaatactctccggaccagtttaaaagttccaacattgcgaagaaagaactcagaaaagaattgatggatctgggctttaaagtccgctatataagcgaaaattacaagatgatggcgatcgaaggtacagccactcttcagggggtgaatcctctgcaagtttgggcgtataatatgattaaagctccggaagcgtgggctattacgggcggatccctgagcgttaaagtagcagtcctggatacagggatcgaccataatcacccatccttggccaacttcgtgaatactaatcttggccgctcgtttgttggaggaaacaccatggatgttcaaggtcatggcacacatgttgctggcacgattgcatcttatgggccggtaagcggagtgatgcagagtgcgacactgatcccggtcaaagtgctcgataattctggcagcgggtccctttacggtattacgcaaggcatattgtatgccgccgacatcgatgcagacgtcattaacatgtctctgggtggaggaggctataatcagggcatggatgaggctactcaaacagcagttgctaagggaaccattgtagtagcagcgactggcaatgatggtgcatcgtcgatcagttatcctgctgcctacagcagcgtcattgcggtgggatctgtggaccaaaatcgtgttcgatcctcgttttctaactatggatctgggcttgaactgatggcaccgggcagcaacatctacagtacgtatcctaatggcagatatcgcactttgagtggtacaagcatggctactccgcacgttgcgggcgtagctgggctcattcgcgcagccaacccagacatagtggtcgcgcaagcccgtcagattctgcgggataccgcgcaagaagcaggatcgttcacacagtacggctatggaatcgtcgatgctcatgccgccgttgttgctgcatccggtggttcgggcggc

SEQ ID NO: 1680 - protein, 413 aa, synthetic construct
  REGION 1..413: note = Variant of serine peptidase from Bacillus sinesaloumensis
MADQASQANGNQDVIEGELIVSVEPKNGKPDVSIQSAQSVTGQEDVLKSKGFTIVDTLHVEDSSVKPLVSKNFNKKVVEKMGLVYLVQYSPDQFKSSNIAKKELRKELMDLGFKVRYISENYKMMAIEGTATLQGVNPLQVWAYNMIKAPEAWAITGGSLSVKVAVLDTGIDHNHPSLANFVNTNLGRSFVGGNTMDVQGHGTHVAGTIASYGPVSGVMQSATLIPVKVLDNSGSGSLYGITQGILYAADIDADVINMSLGGGGYNQGMDEATQTAVAKGTIVVAATGNDGASSISYPAAYSSVIAVGSVDQNRVRSSFSNYGSGLELMAPGSNIYSTYPNGRYRTLSGTSMATPHVAGVAGLIRAANPDIVVAQARQILRDTAQEAGSFTQYGYGIVDAHAAVVAASGGSGG

SEQ ID NO: 1681 - DNA, 1239 bp, synthetic construct
  misc_feature 1..1239: note = Variant of serine peptidase from Bacillus sinesaloumensis
  source 1..1239: mol_type = other DNA
atggcagatcaagctagtcaagctaatggaaaccaggacgtcattgaaggcgagctgatcgtttcagtggaaccgaagaacggtaaacctgatgtgagcattcaaagtgcacaatccgtaacagggcaggaagacgtccttaaatcgaaaggctttacgatcgttgataccttgcatgtagaggatagcagcgtcaagccactcgtctcgaagaatttcaataagaaagtggtggagaagatgggactggtgtatcttgttcaatactctccggaccagtttaaaagttccaacattgcgaagaaagaactcagaaaagaattgatggatctgggctttaaagtccgctatataagcgaaaattacaagatgatggcgatcgaaggtacagccactcttcagggggtgaatcctctgcaagtttgggcgtataatatgattaaagctccggaagcgtgggctattacgggcggatccctgagcgttaaagtagcagtcctggatacagggatcgaccataatcacccatccttggccaacttcgtgaatactaatcttggccgctcgtttgttggaggaaacaccatggatgttcaaggtcatggcacacatgttgctggcacgattgcatcttcggggccggtaagcggagtgatgcagagtgcgacactgatcccggtcaaagtgctcgataattctggcagcgggtccctttacggtattacgcagggcatattgtatgccgcggacatcgatgcagacgtcattaacatgtctctgggtggaggaggctataatcagggcatggatgaggctactcaaacggcagttgctatgggaaccattgtagtagcagcgactggcaatgatggtgcatcgtcgatcagttatcctgctgcctacagcagcgtcattgcggtgggatctgtggaccgcaatcgtgttcgatcctcgttttctaactatggatctgggcttgaactgatggcaccgggcagcaacatctacagtacgtatcctaatggcagatatcgcacgttgagtggtacaagcatggctactccgcacgttgcgggcgtagctgggctcattcgcgcagccaacccagacatagtggtcgcgcaagcccgtcagattctgcgggataccgcgcaagaagcaggatcgttcacacagtacggctatggaatcgtcgatgctcatgccgccgttgttgctgcatccggtggttcgggcggc

SEQ ID NO: 1682 - protein, 413 aa, synthetic construct
  REGION 1..413: note = Variant of serine peptidase from Bacillus sinesaloumensis
MADQASQANGNQDVIEGELIVSVEPKNGKPDVSIQSAQSVTGQEDVLKSKGFTIVDTLHVEDSSVKPLVSKNFNKKVVEKMGLVYLVQYSPDQFKSSNIAKKELRKELMDLGFKVRYISENYKMMAIEGTATLQGVNPLQVWAYNMIKAPEAWAITGGSLSVKVAVLDTGIDHNHPSLANFVNTNLGRSFVGGNTMDVQGHGTHVAGTIASSGPVSGVMQSATLIPVKVLDNSGSGSLYGITQGILYAADIDADVINMSLGGGGYNQGMDEATQTAVAMGTIVVAATGNDGASSISYPAAYSSVIAVGSVDRNRVRSSFSNYGSGLELMAPGSNIYSTYPNGRYRTLSGTSMATPHVAGVAGLIRAANPDIVVAQARQILRDTAQEAGSFTQYGYGIVDAHAAVVAASGGSGG

SEQ ID NO: 1683 - DNA, 1239 bp, synthetic construct
  misc_feature 1..1239: note = Variant of serine peptidase from Bacillus sinesaloumensis
  source 1..1239: mol_type = other DNA
atggcagatcaagctagtcaagctaatggaaaccaggacgtcattgaaggcgagctgatcgtttcagtggaaccgaagaacggtaaacctgatgtgagcattcaaagtgcacaatccgtaacagggcaggaagacgtccttaaatcgaaaggctttacgatcgttgataccttgcatgtagaggatagcagcgtcaagccactcgtctcgaagaatttcaataagaaagtggtggagaagatgggactggtgtatcttgttcaatactctccggaccagtttaaaagttccaacattgcgaagaaagaactcagaaaagaattgatggatctgggctttaaagtccgctatataagcgaaaattacaagatgatggcgatcgaaggtacagccactcttcagggggtgaatcctctgcaagtttgggcgtatgaaatgattaaagctccggaagcgtgggctattacgggcggatccctgagcgttaaagtagcagtcctggatacagggatcgaccataatcacccatccttagccaacttcgtgaatacgaatctgggccgctcgtttgttggaggaaacaccatggatgttcaaggtcatggcacacatgttgctggcacgattgcatcttatgggccggtaagcggagtgatgcagagtgcgacactgatcccggtcaaagtgctcgataattctggcagcgggtccctttacggtattacgcagggcatattgtatgccgccgacatcgatgcagacgtcattaacatgtctctgggtggaggaggctataatcagggcatggatgaggctactcaaacagcagttgctatgggaaccattgtagtagcagcgactggcaatgatggtgcatcgtcgatcagttatcctgctgcctacagcagcgtcattgcggtgggatctgtggaccaaaatcgtgttcgatcctcgttttctaactatggatctgggcttgaactgatggcaccgggcagcaacatctacagtacgtatcctaatggcagatatcgcacgttgagtggtacaagcatggctactccgcacgttgcgggcgtagctgggctcattcgcgcagccaacccagacatagtggtcgcgcaagcccgtcagattctgcgggataccgcgcaagaagcaggatcgttcacacagtacggctatggaatcgtcgatgctcatgccgccgttgttgctgcatccggtggttcgggcggc

SEQ ID NO: 1684 - protein, 413 aa, synthetic construct
  REGION 1..413: note = Variant of serine peptidase from Bacillus sinesaloumensis
MADQASQANGNQDVIEGELIVSVEPKNGKPDVSIQSAQSVTGQEDVLKSKGFTIVDTLHVEDSSVKPLVSKNFNKKVVEKMGLVYLVQYSPDQFKSSNIAKKELRKELMDLGFKVRYISENYKMMAIEGTATLQGVNPLQVWAYEMIKAPEAWAITGGSLSVKVAVLDTGIDHNHPSLANFVNTNLGRSFVGGNTMDVQGHGTHVAGTIASYGPVSGVMQSATLIPVKVLDNSGSGSLYGITQGILYAADIDADVINMSLGGGGYNQGMDEATQTAVAMGTIVVAATGNDGASSISYPAAYSSVIAVGSVDQNRVRSSFSNYGSGLELMAPGSNIYSTYPNGRYRTLSGTSMATPHVAGVAGLIRAANPDIVVAQARQILRDTAQEAGSFTQYGYGIVDAHAAVVAASGGSGG

SEQ ID NO: 1685 - DNA, 1239 bp, synthetic construct
  misc_feature 1..1239: note = Variant of serine peptidase from Bacillus sinesaloumensis
  source 1..1239: mol_type = other DNA
atggcagatcaagctagtcaagctaatggaaaccaggacgtcattgaaggcgagctgatcgtttcagtggaaccgaagaacggtaaacctgatgtgagcattcaaagtgcacaatccgtaacagggcaggaagacgtccttaaatcgaaaggctttacgatcgttgataccttgcatgtagaggatagcagcgtcaagccactcgtctcgaagaatttcaataagaaagtggtggagaagatgggactggtgtatcttgttcaatactctccggaccagtttaaaagttccaacattgcgaagaaagaactcagaaaagaattgatggatctgggctttaaagtccgctatataagcgaaaattacaagatgatggcgatcgaaggtacagccactcttcagggggtgaatcctctgcaagtttgggcgtataatatgattaaagctccggaagcgtgggctattacgggcggatccctgagcgttaaagtagcagtcctggatacagggatcgaccataatcacccatccttgtcgaactttgtgaatacgaatctgggccgctcgtttgttggaggaaacaccatggatgttcaaggtcatggcacacatgttgctggcacgattgcatcttatgggccggtaagcggagtgatgcagagtgcgacactgatcccggtcaaagtgctcgataattctggcagcgggtccctttacggtattacgcagggcatattgtatgccgccgacatcgatgcagacgtcattaacatgtctctgggtggaggaggctataatcagggcatggatgaggctactcaaacagcagttgctatgggaaccattgtagtagcagcgactggcaatgatggtgcatcgtcgatcagttatcctgctgcctacagcagcgtcattgcggtgggatctgtggaccaaaatcgtgttcgatcctcgttttctaactatggatctgggcttgaactgatggcaccgggcagcaacatctacagtacgtatcctaatggcagatatcgcagtttgagtggtacaagcatggctactccgcacgttgcgggcgtagctgggctcattcgcgcagccaacccagacatagtggtcgcgcaagcccgtcagattctgcgggataccgcgcaagaagcaggatcgttcacacagtacggctatggaatcgtcgatgctcatgccgccgttgttgctgcatccggtggttcgggcggc

SEQ ID NO: 1686 - protein, 413 aa, synthetic construct
  REGION 1..413: note = Variant of serine peptidase from Bacillus sinesaloumensis
MADQASQANGNQDVIEGELIVSVEPKNGKPDVSIQSAQSVTGQEDVLKSKGFTIVDTLHVEDSSVKPLVSKNFNKKVVEKMGLVYLVQYSPDQFKSSNIAKKELRKELMDLGFKVRYISENYKMMAIEGTATLQGVNPLQVWAYNMIKAPEAWAITGGSLSVKVAVLDTGIDHNHPSLSNFVNTNLGRSFVGGNTMDVQGHGTHVAGTIASYGPVSGVMQSATLIPVKVLDNSGSGSLYGITQGILYAADIDADVINMSLGGGGYNQGMDEATQTAVAMGTIVVAATGNDGASSISYPAAYSSVIAVGSVDQNRVRSSFSNYGSGLELMAPGSNIYSTYPNGRYRSLSGTSMATPHVAGVAGLIRAANPDIVVAQARQILRDTAQEAGSFTQYGYGIVDAHAAVVAASGGSGG

SEQ ID NO: 1687 - DNA, 1239 bp, synthetic construct
  misc_feature 1..1239: note = Variant of serine peptidase from Bacillus sinesaloumensis
  source 1..1239: mol_type = other DNA
atggcagatcaagctagtcaagctaatggaaaccaggacgtcattgaaggcgagctgatcgtttcagtggaaccgaagaacggtaaacctgatgtgagcattcaaagtgcacaatccgtaacagggcaggaagacgtccttaaatcgaaaggctttacgatcgttgataccttgcatgtagaggatagcagcgtcaagccactcgtctcgaagaatttcaataagaaagtggtggagaagatgggactggtgtatcttgttcaatactctccggaccagtttaaaagttccaacattgcgaagaaagaactcagaaaagaattgatggatctgggctttaaagtccgctatataagcgaaaattacaagatgatggcgatcgaaggtacagccactcttcagggggtgaatcctctgcaagtttgggcgtataatatgattaaagctccggaagcgtgggctattacgggcggatccctgagcgttaaagtagcagtcctggatacagggatcgaccataatcacccatccttggccaacttcgtgaatactaatcttggccgctcgtttgttggaggaaacaccatggatgttcaaggtcatggcacacatgttgctggcacgattgcatcttatgggaatgtaagcggagtgatgcagagtgcgacactgatcccggtcaaagtgctcgataattctggcagcgggtccctttacggtattacgcagggcatattgtatgccgccgacatcgatgcagacgtcattaacatgtctctgggtggaggaggctataatcagggcatggatgaggctactcaaacagcagttgctatgggaaccattgtagtagcagcgactggcaatgatggtgcatcgtcgatcagttatcctgctgcctacagcagcgtcattgcggtgggatctgtggaccaaaatcgtgttcgatcctcgttttctaactatggatctgggcttgaactgatggcaccgggcagcaacatctacagtacgtatcctaatggcagatatcgcacgttgagtggtacaagcatggctactccgcacgttgcgggcgtagctgggctcattcgcgcagccaacccagacatagtggtcgcgcaagcccgtcagattctgcgggataccgcgcaagaagcaggatcgttcacacagtacggctatggaatcgtcgatgctcatgccgccgttgttgctgcatccggtggttcgggcggc

SEQ ID NO: 1688 - protein, 413 aa, synthetic construct
  REGION 1..413: note = Variant of serine peptidase from Bacillus sinesaloumensis
MADQASQANGNQDVIEGELIVSVEPKNGKPDVSIQSAQSVTGQEDVLKSKGFTIVDTLHVEDSSVKPLVSKNFNKKVVEKMGLVYLVQYSPDQFKSSNIAKKELRKELMDLGFKVRYISENYKMMAIEGTATLQGVNPLQVWAYNMIKAPEAWAITGGSLSVKVAVLDTGIDHNHPSLANFVNTNLGRSFVGGNTMDVQGHGTHVAGTIASYGNVSGVMQSATLIPVKVLDNSGSGSLYGITQGILYAADIDADVINMSLGGGGYNQGMDEATQTAVAMGTIVVAATGNDGASSISYPAAYSSVIAVGSVDQNRVRSSFSNYGSGLELMAPGSNIYSTYPNGRYRTLSGTSMATPHVAGVAGLIRAANPDIVVAQARQILRDTAQEAGSFTQYGYGIVDAHAAVVAASGGSGG

SEQ ID NO: 1689 - DNA, 1239 bp, synthetic construct
  misc_feature 1..1239: note = Variant of serine peptidase from Bacillus sinesaloumensis
  source 1..1239: mol_type = other DNA
atggcagatcaagctagtcaagctaatggaaaccaggacgtcattgaaggcgagctgatcgtttcagtggaaccgaagaacggtaaacctgatgtgagcattcaaagtgcacaatccgtaacagggcaggaagacgtccttaaatcgaaaggctttacgatcgttgataccttgcatgtagaggatagcagcgtcaagccactcgtctcgaagaatttcaataagaaagtggtggagaagatgggactggtgtatcttgttcaatactctccggaccagtttaaaagttccaacattgcgaagaaagaactcagaaaagaattgatggatctgggctttaaagtccgctatataagcgaaaattacaagatgatggcgatcgaaggtacagccactcttcagggggtgaatcctctgcaagtttgggcgtataatatgattaaagctccggaagcgtgggctattacgggcggatccctgagcgttaaagtagcagtcctggatacagggatcgaccataatcacccatccttggccaacttcgtgaatactaatcttggccgctcgtttgttggaggaaacaccatggatgttcaaggtcatggcacacatgttgctggcacgattgcatcttatgggccggtaagcggagtgatgcagagtgcgacactgatcccggtcaaagtgctcgataattctggcagcgggtccctttacggtattacgcagggcatattgtatgccgccgacatcgatgcagacgtcattaacatgtctctgggtggaggaggctataatcagggcatggatgaggctactcaaacagcagttgctatgggaaccattgtagtagcagcgactggcaatgatggtgcatcgtcgatcagttatcctgctgcctacagcagcgtcattgcggtgggatctgtggaccaaaatcgtgttcgatcctcgttttctaactatggatctgggcttgaactgatggcaccgggcagcaacatctacagtacgtatcctaatggcagatatcgcagtttgagtggtacaagcatggctactccgcacgttgcgggcgtagctgggctcattcgcgcagccaacccagacatagtggtcgcgcaagcccgtcagattctgcgggataccgcgcaagaagcaggatcgttcacacagtacggctatggaatcgtcgatgctcatgccgccgttgttgctgcatccggtggttcgggcggc

SEQ ID NO: 1690 - protein, 413 aa, synthetic construct
  REGION 1..413: note = Variant of serine peptidase from Bacillus sinesaloumensis
MADQASQANGNQDVIEGELIVSVEPKNGKPDVSIQSAQSVTGQEDVLKSKGFTIVDTLHVEDSSVKPLVSKNFNKKVVEKMGLVYLVQYSPDQFKSSNIAKKELRKELMDLGFKVRYISENYKMMAIEGTATLQGVNPLQVWAYNMIKAPEAWAITGGSLSVKVAVLDTGIDHNHPSLANFVNTNLGRSFVGGNTMDVQGHGTHVAGTIASYGPVSGVMQSATLIPVKVLDNSGSGSLYGITQGILYAADIDADVINMSLGGGGYNQGMDEATQTAVAMGTIVVAATGNDGASSISYPAAYSSVIAVGSVDQNRVRSSFSNYGSGLELMAPGSNIYSTYPNGRYRSLSGTSMATPHVAGVAGLIRAANPDIVVAQARQILRDTAQEAGSFTQYGYGIVDAHAAVVAASGGSGG

SEQ ID NO: 1691 - DNA, 1239 bp, synthetic construct
  misc_feature 1..1239: note = Variant of serine peptidase from Bacillus sinesaloumensis
  source 1..1239: mol_type = other DNA
atggcagatcaagctagtcaagctaatggaaaccaggacgtcattgaaggcgagctgatcgtttcagtggaaccgaagaacggtaaacctgatgtgagcattcaaagtgcacaatccgtaacagggcaggaagacgtccttaaatcgaaaggctttacgatcgttgataccttgcatgtagaggatagcagcgtcaagccactcgtctcgaagaatttcaataagaaagtggtggagaagatgggactggtgtatcttgttcaatactctccggaccagtttaaaagttccaacattgcgaagaaagaactcagaaaagaattgatggatctgggctttaaagtccgctatataagcgaaaattacaagatgatggcgatcgaaggtacagccactcttcagggggtgaatcctctgcaagtttgggcgtataatatgattaaagctccggaagcgtgggctattacgggcggatccctgagcgttaaggtagcagtcctggatacagggatcgaccataatcacccatccttggccaacttcgtgaatactaatcttggccgctcgtttgttggaggaaacaccatggatgttcaaggtcatggcacacatgttgctggcacgattgcatcttatgggccggtaagcggagtgatgcaaagtgcgacactgatcccggtcaaagtgctcgataattctggcagcgggtccctttacggtattacgcagggcatattgtatgccgccgacatcgatgcagacgtcattaacatgtctctgggtggaggaggctataatcagggcatggatgaggctactcaaacagcagttgctatgggaaccattgtagtagcagcgactggcaatgatggtgcatcgtcgatcagttatcctgctgcctacagcagcgtcattgcggtgggatctgtggaccaaaatcgtcgtcgatcctcgttttctaactatggatctgggcttgaactgatggcaccgggcagcaacatctacagtacgtatcctaatggcagatatcgcacgttgagtggtacaagcatggctactccgcacgttgcgggcgtagctgggctcattcgcgcagccaacccagacatatatgtcgcgcaggcccgtcagattctgcgggataccgcgcaagaagcaggatcgttcacacagtacggctatggaatcgtcgatgctcatgccgccgttgttgctgcatccggtggttcgggcggc

SEQ ID NO: 1692 - protein, 413 aa, synthetic construct
  REGION 1..413: note = Variant of serine peptidase from Bacillus sinesaloumensis
MADQASQANGNQDVIEGELIVSVEPKNGKPDVSIQSAQSVTGQEDVLKSKGFTIVDTLHVEDSSVKPLVSKNFNKKVVEKMGLVYLVQYSPDQFKSSNIAKKELRKELMDLGFKVRYISENYKMMAIEGTATLQGVNPLQVWAYNMIKAPEAWAITGGSLSVKVAVLDTGIDHNHPSLANFVNTNLGRSFVGGNTMDVQGHGTHVAGTIASYGPVSGVMQSATLIPVKVLDNSGSGSLYGITQGILYAADIDADVINMSLGGGGYNQGMDEATQTAVAMGTIVVAATGNDGASSISYPAAYSSVIAVGSVDQNRRRSSFSNYGSGLELMAPGSNIYSTYPNGRYRTLSGTSMATPHVAGVAGLIRAANPDIYVAQARQILRDTAQEAGSFTQYGYGIVDAHAAVVAASGGSGG

SEQ ID NO: 1693 - DNA, 1239 bp, synthetic construct
  misc_feature 1..1239: note = Variant of serine peptidase from Bacillus sinesaloumensis
  source 1..1239: mol_type = other DNA
atggcagatcaagctagtcaagctaatggaaaccaggacgtcattgaaggcgagctgatcgtttcagtggaaccgaagaacggtaaacctgatgtgagcattcaaagtgcacaatccgtaacagggcaggaagacgtccttaaatcgaaaggctttacgatcgttgataccttgcatgtagaggatagcagcgtcaagccactcgtctcgaagaatttcaataagaaagtggtggagaagatgggactggtgtatcttgttcaatactctccggaccagtttaaaagttccaacattgcgaagaaagaactcagaaaagaattgatggatctgggctttaaagtccgctatataagcgaaaattacaagatgatggcgatcgaaggtacagccactcttcagggggtgaatcctctgcaagtttgggcgtataatatgattaaagctccggaagcgtgggctattacgggcggatccctgagcgttaaggtagcagtcctggatacagggatcgaccataatcacccatccttggccaacttcgtgaatactaatcttggccgctcgtttgttggaggaaacaccatggatgttcaaggtcatggcacacatgttgctggcacgattgcatcttatgggccggtaagcggagtgatgcaaagtgcgacactgatcccggtcaaagtgctcgataattctggcagcgggtccctttacggtattacgcagggcattttgtatgccgccgacatcgatgcagacgtcattaacatgtctctgggtggaggaggctataatcagggcatggatgaggctactcaaacagcagttgctatgggaaccattgtagtagcagcgactggcaatgatggtgcatcgtcgatcagttatcctgctgcctacagcagcgtcattgcggtgggatctgtggaccaaaatcgtgttcgatcctcgttttctaactatggatctgggcttgaactgatggcaccgggcagcaacatctacagtacgtatcctaatggcagatatcgcacgttgagtggtacaagcatggctactccgcacgttgcgggcgtagctgggctcattcgcgcagccaacccagacatatatgtcgcgcaggcccgtcagattctgcgggataccgcgcaagaagcaggatcgttcacacagtacgggtatggaatcgtcgatgctcatgccgccgttgttgctgcatccggtggttcgggcggc

SEQ ID NO: 1694 - protein, 413 aa, synthetic construct
  REGION 1..413: note = Variant of serine peptidase from Bacillus sinesaloumensis
MADQASQANGNQDVIEGELIVSVEPKNGKPDVSIQSAQSVTGQEDVLKSKGFTIVDTLHVEDSSVKPLVSKNFNKKVVEKMGLVYLVQYSPDQFKSSNIAKKELRKELMDLGFKVRYISENYKMMAIEGTATLQGVNPLQVWAYNMIKAPEAWAITGGSLSVKVAVLDTGIDHNHPSLANFVNTNLGRSFVGGNTMDVQGHGTHVAGTIASYGPVSGVMQSATLIPVKVLDNSGSGSLYGITQGILYAADIDADVINMSLGGGGYNQGMDEATQTAVAMGTIVVAATGNDGASSISYPAAYSSVIAVGSVDQNRVRSSFSNYGSGLELMAPGSNIYSTYPNGRYRTLSGTSMATPHVAGVAGLIRAANPDIYVAQARQILRDTAQEAGSFTQYGYGIVDAHAAVVAASGGSGG

SEQ ID NO: 1695 - DNA, 1239 bp, synthetic construct
  misc_feature 1..1239: note = Variant of serine peptidase from Bacillus sinesaloumensis
  source 1..1239: mol_type = other DNA
atggcagatcaagctagtcaagctaatggaaaccaggacgtcattgaaggcgagctgatcgtttcagtggaaccgaagaacggtaaacctgatgtgagcattcaaagtgcacaatccgtaacagggcaggaagacgtccttaaatcgaaaggctttacgatcgttgataccttgcatgtagaggatagcagcgtcaagccactcgtctcgaagaatttcaataagaaagtggtggagaagatgggactggtgtatcttgttcaatactctccggaccagtttaaaagttccaacattgcgaagaaagaactcagaaaagaattgatggatctgggctttaaagtccgctatataagcgaaaattacaagatgatggcgatcgaaggtacagccactcttcagggggtgaatcctctgcaagtttgggcgtataatatgattaaagctccggaagcgtgggctattacgggcggatccctgagcgttaaggtagcagtcctggatacagggatcgaccataatcacccatccttggccaacttcgtgaatactaatcttggccgctcgtttgttggaggaaacaccatggatgttcaaggtcatggcacacatgttgctggcacgattgcatcttatgggccggtaagcggagtgatgcaaagtgcgacactgatcccggtcaaagtgctcgataattctggcagcgggtccctttacggtattacgcagggcatattgtatgccgccgacatcgatgcagacgtcattaacatgtctctgggtggaggaggctataatcagggcatggatgaggctactcaaacagcagttgctatgggaaccattgtagtagcagcgactggcaatgatggtgcatcgtcgatcagttatcctgctgcctacagcagcgtcattgcggtgggatctgtggaccaaaatcgtgttcgatcctcgttttctaactatggatctgggcttgaactgatggcaccgggcagcaacatctacagtacgtatcctaatggcagatatcgcacgttgagtggtacaagcatggctactccgcacgttgcgggcgtagctgggctcattcgcgcagccaacccagacatagtcgtcgcggccgcccgtcagattctgcgggataccgcgcaagaagcaggatcgttcacacagtacggctatggaatcgtcgatgctcatgccgccgttgttgctgcatccggtggttcgggcggc

SEQ ID NO: 1696 - protein, 413 aa, synthetic construct
  REGION 1..413: note = Variant of serine peptidase from Bacillus sinesaloumensis
MADQASQANGNQDVIEGELIVSVEPKNGKPDVSIQSAQSVTGQEDVLKSKGFTIVDTLHVEDSSVKPLVSKNFNKKVVEKMGLVYLVQYSPDQFKSSNIAKKELRKELMDLGFKVRYISENYKMMAIEGTATLQGVNPLQVWAYNMIKAPEAWAITGGSLSVKVAVLDTGIDHNHPSLANFVNTNLGRSFVGGNTMDVQGHGTHVAGTIASYGPVSGVMQSATLIPVKVLDNSGSGSLYGITQGILYAADIDADVINMSLGGGGYNQGMDEATQTAVAMGTIVVAATGNDGASSISYPAAYSSVIAVGSVDQNRVRSSFSNYGSGLELMAPGSNIYSTYPNGRYRTLSGTSMATPHVAGVAGLIRAANPDIVVAAARQILRDTAQEAGSFTQYGYGIVDAHAAVVAASGGSGG

SEQ ID NO: 1697 - DNA, 1239 bp, synthetic construct
  misc_feature 1..1239: note = Variant of serine peptidase from Bacillus sinesaloumensis
  source 1..1239: mol_type = other DNA
atggcagatcaagctagtcaagctaatggaaaccaggacgtcattgaaggcgagctgatcgtttcagtggaaccgaagaacggtaaacctgatgtgagcattcaaagtgcacaatccgtaacagggcaggaagacgtccttaaatcgaaaggctttacgatcgttgataccttgcatgtagaggatagcagcgtcaagccactcgtctcgaagaatttcaataagaaagtggtggagaagatgggactggtgtatcttgttcaatactctccggaccagtttaaaagttccaacattgcgaagaaagaactcagaaaagaattgatggatctgggctttaaagtccgctatataagcgaaaattacaagatgatggcgatcgaaggtacagccactcttcagggggtgaatcctctgcaagtttgggcgtataatatgattaaagctccggaagcgtgggctattacgggcggatccctgagcgttaaggtagcagtcctggatacagggatcgaccataatcacccatccttggccaacttcgtgaatactaatcttggccgctcgtttgttggaggaaacaccatggatgttcaaggtcatggcacacatgttgctggcacgattgcatcttatgggccggtaagcggagtgatgcagagtgcgacactgatcccggtcaaagtgctcgataattctggcagcgggtccctttacggtattacgcagggcatattgtatgccgccgacatcgatgcagacgtcattaacatgtctctgggtggaggattctataatcaaggcatggatgaggctactcaaacagcagttgctatgggaaccattgtagtagcagcgactggcaatgatggtgcatcgtcgatcagttatcctgctgcctacagcagcgtcattgcggtgggatctgtggaccaaaatcgtgttcgatcctcgttttctaactatggatctgggcttgaactgatggcaccgggcagcaacatctacagtacgtatcctaatggcagatatcgcacgttgagtggtacaagcatggctactccgcacgttgcgggcgtagctgggctcattcgcgcagccaacccagacatagtggtcgcgcaagcccgtcagattctgcgggataccgcgcaagaagcaggatcgttcacacagtacggctatggaatcgtcgatgctcatgccgccgttgttgctgcatccggtggttcgggcggc

SEQ ID NO: 1698 - protein, 413 aa, synthetic construct
  REGION 1..413: note = Variant of serine peptidase from Bacillus sinesaloumensis
MADQASQANGNQDVIEGELIVSVEPKNGKPDVSIQSAQSVTGQEDVLKSKGFTIVDTLHVEDSSVKPLVSKNFNKKVVEKMGLVYLVQYSPDQFKSSNIAKKELRKELMDLGFKVRYISENYKMMAIEGTATLQGVNPLQVWAYNMIKAPEAWAITGGSLSVKVAVLDTGIDHNHPSLANFVNTNLGRSFVGGNTMDVQGHGTHVAGTIASYGPVSGVMQSATLIPVKVLDNSGSGSLYGITQGILYAADIDADVINMSLGGGFYNQGMDEATQTAVAMGTIVVAATGNDGASSISYPAAYSSVIAVGSVDQNRVRSSFSNYGSGLELMAPGSNIYSTYPNGRYRTLSGTSMATPHVAGVAGLIRAANPDIVVAQARQILRDTAQEAGSFTQYGYGIVDAHAAVVAASGGSGG

SEQ ID NO: 1699 - DNA, 1239 bp, synthetic construct
  misc_feature 1..1239: note = Variant of serine peptidase from Bacillus sinesaloumensis
  source 1..1239: mol_type = other DNA
atggcagatcaagctagtcaagctaatggaaaccaggacgtcattgaaggcgagctgatcgtttcagtggaaccgaagaacggtaaacctgatgtgagcattcaaagtgcacaatccgtaacagggcaggaagacgtccttaaatcgaaaggctttacgatcgttgataccttgcatgtagaggatagcagcgtcaagccactcgtctcgaagaatttcaataagaaagtggtggagaagatgggactggtgtatcttgttcaatactctccggaccagtttaaaagttccaacattgcgaagaaagaactcagaaaagaattgatggatctgggctttaaagtccgctatataagcgaaaattacaagatgatggcgatcgaaggtacagccactcttcagggggtgaatcctctgcaagtttgggcgtataatatgattaaagctccggaagcgtgggctattacgggcggatccctgagcgttaaggtagcagtcctggatacagggatcgaccataatcacccatccttgtcgaacttcgtgaatactaatcttggccgctcgtttgttggaggaaacaccatggatgttcaaggtcatggcacacatgttgctggcacgattgcatcttatgggccggtaagcggagtgatgcagagtgcgacactgatcccggtcaaagtgctcgataattctggcagcgggtccctttacggtattacgcagggcatattgtatgccgccgacatcgatgcagacgtcattaacatgtctctgggtggaggaggctataatcagggcatggatgaggctactcaaacagcagttgctatgggaaccattgtagtagcagcgactggcaatgatggtgcatcgtcgatcagttatcctgctgcctacagcagcgtcattgcggtgggatctgtggaccaaaatcgtgttcgatcctcgttttctaactatggatctgggcttgaactgatggcaccgggcagcaacatctacagtacgtatcctaatggcagatatcgcacgttgagtggtacaagcatggctactccgcacgttgcgggcgtagctgggctcattcgcgcagccaacccagacatagtggtcgcgcaagcccgtcagattctgcgggataccgcgcaagaagcaggatcgttcacacagtacggctatggaatcgtcgatgctcatgccgccgttgttgctgcatccggtggttcgggcggc

SEQ ID NO: 1700 - protein, 413 aa, synthetic construct
  REGION 1..413: note = Variant of serine peptidase from Bacillus sinesaloumensis
MADQASQANGNQDVIEGELIVSVEPKNGKPDVSIQSAQSVTGQEDVLKSKGFTIVDTLHVEDSSVKPLVSKNFNKKVVEKMGLVYLVQYSPDQFKSSNIAKKELRKELMDLGFKVRYISENYKMMAIEGTATLQGVNPLQVWAYNMIKAPEAWAITGGSLSVKVAVLDTGIDHNHPSLSNFVNTNLGRSFVGGNTMDVQGHGTHVAGTIASYGPVSGVMQSATLIPVKVLDNSGSGSLYGITQGILYAADIDADVINMSLGGGGYNQGMDEATQTAVAMGTIVVAATGNDGASSISYPAAYSSVIAVGSVDQNRVRSSFSNYGSGLELMAPGSNIYSTYPNGRYRTLSGTSMATPHVAGVAGLIRAANPDIVVAQARQILRDTAQEAGSFTQYGYGIVDAHAAVVAASGGSGG

SEQ ID NO: 1701 - DNA, 1239 bp, synthetic construct
  misc_feature 1..1239: note = Variant of serine peptidase from Bacillus sinesaloumensis
  source 1..1239: mol_type = other DNA
atggcagatcaagctagtcaagctaatggaaaccaggacgtcattgaaggcgagctgatcgtttcagtggaaccgaagaacggtaaacctgatgtgagcattcaaagtgcacaatccgtaacagggcaggaagacgtccttaaatcgaaaggctttacgatcgttgataccttgcatgtagaggatagcagcgtcaagccactcgtctcgaagaatttcaataagaaagtggtggagaagatgggactggtgtatcttgttcaatactctccggaccagtttaaaagttccaacattgcgaagaaagaactcagaaaagaattgatggatctgggctttaaagtccgctatataagcgaaaattacaagatgatggcgatcgaaggtacagccactcttcagggggtgaatcctctgcaagtttgggcgtataatatgattaaagctccggaagcgtgggctattacgggcggatccctgagcgttaaagtagcagtcctggatacagggatcgaccataatcacccatccttggcgaacttcgtgaatactactcttggccgctcgtttgttggaggaaacaccatggatgttcaaggtcatggcacacatgttgctggcacgattgcatcttatgggccggtaagcggagtgatgcagagtgcgacactgatcccggtcaaagtgctcgataattctggcagcgggtccctttacggtattacgcagggcatattgtatgccgccgacatcgatgcagacgtcattaacatgtctctgggtggaggaggctataatcagggcatggatgaggctactcaaacagcagttgctatgggaaccattgtagtagcagcgactggcaatgatggtgcatcgtcgatcagttatcctgctgcctacagcagcgtcattgcggtgggatctgtggaccaaaatcgtgttcgatcctcgttttctaactatggatctgggcttgaactgatggcaccgggcagcaacatctacagtacgtatcctaatggcagatatcgcacgttgagtggtacaagcatggctactccgcacgttgcgggcgtagctgggctcattcgcgcagccaacccagacatagtggtcgcgcaagcccgtcagattctgcgggataccgcgcaagaagcaggatcgttcacacagtacggctatggaatcgtcgatgctcatgccgccgttgttgctgcatccggtggttcgggcggc

SEQ ID NO: 1702 - protein, 413 aa, synthetic construct
  REGION 1..413: note = Variant of serine peptidase from Bacillus sinesaloumensis
MADQASQANGNQDVIEGELIVSVEPKNGKPDVSIQSAQSVTGQEDVLKSKGFTIVDTLHVEDSSVKPLVSKNFNKKVVEKMGLVYLVQYSPDQFKSSNIAKKELRKELMDLGFKVRYISENYKMMAIEGTATLQGVNPLQVWAYNMIKAPEAWAITGGSLSVKVAVLDTGIDHNHPSLANFVNTTLGRSFVGGNTMDVQGHGTHVAGTIASYGPVSGVMQSATLIPVKVLDNSGSGSLYGITQGILYAADIDADVINMSLGGGGYNQGMDEATQTAVAMGTIVVAATGNDGASSISYPAAYSSVIAVGSVDQNRVRSSFSNYGSGLELMAPGSNIYSTYPNGRYRTLSGTSMATPHVAGVAGLIRAANPDIVVAQARQILRDTAQEAGSFTQYGYGIVDAHAAVVAASGGSGG

SEQ ID NO: 1703 - DNA, 1239 bp, synthetic construct
  misc_feature 1..1239: note = Variant of serine peptidase from Bacillus sinesaloumensis
  source 1..1239: mol_type = other DNA
atggcagatcaagctagtcaagctaatggaaaccaggacgtcattgaaggcgagctgatcgtttcagtggaaccgaagaacggtaaacctgatgtgagcattcaaagtgcacaatccgtaacagggcaggaagacgtccttaaatcgaaaggctttacgatcgttgataccttgcatgtagaggatagcagcgtcaagccactcgtctcgaagaatttcaataagaaagtggtggagaagatgggactggtgtatcttgttcaatactctccggaccagtttaaaagttccaacattgcgaagaaagaactcagaaaagaattgatggatctgggctttaaagtccgctatataagcgaaaattacaagatgatggcgatcgaaggtacagccactcttcagggggtgaatcctctgcaagtttgggcgtataatatgattaaagctccggaagcgtgggctattacgggcggatccctgagcgttaaggtagcagtcctggatacagggatcgaccataatcacccatccttggcgaacttcgtgaatactaatcttggccgctcgtttgttggaggaaacaccatggatgttcaaggtcatggcacacatgttgctggcacgattgcatcttatgggccggtaagcggagtgatgcgtagtgcgacactgatcccggtcaaagtgctcgataattctggcagcgggtccctttacggtattacgcagggcattttgtatgccgccgacatcgatgcagacgtcattaacatgtctctgggtggaggaggctataatcagggcatggatgaggctactcaaacagcagttgctatgggaaccattgtagtagcagcgactggcaatgatggtgcatcgtcgatcagttatcctgctgcctacagcagcgtcattgcggtgggatctgtggaccaaaatcgtgtccgatcctcgttttctaactatggaagtgggcttgaactgatggcaccgggcagcaacatctacagtacgtatcctaatggcagatatcgcacgttgagtggtacaagcatggctactccgcacgttgcgggcgtagctgggctcattcgcgcagccaacccagacatatatgtcgcgcaggcccgtcagattctgcgggataccgcgcaagaagcaggatcgttcacacagtacggctatggaatcgtcgatgctcatgccgccgttgttgctgcatccggtggttcgggcggc

SEQ ID NO: 1704 - protein, 413 aa, synthetic construct
  REGION 1..413: note = Variant of serine peptidase from Bacillus sinesaloumensis
MADQASQANGNQDVIEGELIVSVEPKNGKPDVSIQSAQSVTGQEDVLKSKGFTIVDTLHVEDSSVKPLVSKNFNKKVVEKMGLVYLVQYSPDQFKSSNIAKKELRKELMDLGFKVRYISENYKMMAIEGTATLQGVNPLQVWAYNMIKAPEAWAITGGSLSVKVAVLDTGIDHNHPSLANFVNTNLGRSFVGGNTMDVQGHGTHVAGTIASYGPVSGVMRSATLIPVKVLDNSGSGSLYGITQGILYAADIDADVINMSLGGGGYNQGMDEATQTAVAMGTIVVAATGNDGASSISYPAAYSSVIAVGSVDQNRVRSSFSNYGSGLELMAPGSNIYSTYPNGRYRTLSGTSMATPHVAGVAGLIRAANPDIYVAQARQILRDTAQEAGSFTQYGYGIVDAHAAVVAASGGSGG

SEQ ID NO: 1705 - DNA, 1239 bp, synthetic construct
  misc_feature 1..1239: note = Variant of serine peptidase from Bacillus sinesaloumensis
  source 1..1239: mol_type = other DNA
atggcagatcaagctagtcaagctaatggaaaccaggacgtcattgaaggcgagctgatcgtttcagtggaaccgaagaacggtaaacctgatgtgagcattcaaagtgcacaatccgtaacagggcaggaagacgtccttaaatcgaaaggctttacgatcgttgataccttgcatgtagaggatagcagcgtcaagccactcgtctcgaagaatttcaataagaaagtggtggagaagatgggactggtgtatcttgttcaatactctccggaccagtttaaaagttccaacattgcgaagaaagaactcagaaaagaattgatggatctgggctttaaagtccgctatataagcgaaaattacaagatgatggcgatcgaaggtacagccactcttcagggggtgaatcctctgcaagtttgggcgtataatatgattaaagctccggaagcgtgggctattacgggcggatccctgagcgttaaggtagcagtcctggatacagggatcgaccataatcacccatccttggccaacttcgtgaatactaatcttggccgctcgtttgttggaggaaacaccatggatgttcaaggtcatggcacacatgttgctggcacgattgcatcttatgggccggtaagcggagtgatgcagagtgcgacactgatcccggtcaaagtgctcgataattctggcagcgggtccctttacggtattacgcagggcatattgtatgccgccgacatcgatgcagacgtcattaacatgtctctgggtggaggaggctataatcagggcatggatgaggctactcaaacagcagttgctatgggaaccattgtagtagcagcgactggcaatgatggtgcatcgtcgatcagttatcctgctgcctacagcagcgtcattgcggtgggatctgtggaccaaaatcgtgttcgatcctcgttttctaactatggagatgggcttgaactgatggcaccgggcagcaacatctacagtacgtatcctaatggcagatatcgcacgttgagtggtacaagcatggctactccgcacgttgcgggcgtagctgggctcattcgcgcagccaacccagacatagtggtcgcgcaagcccgtcagattctgcgggataccgcgcaagaagcaggatcgttcacacagtacggctatggaatcgtcgatgctcatgccgccgttgttgctgcatccggtggttcgggcggc

SEQ ID NO: 1706 - protein, 413 aa, synthetic construct
  REGION 1..413: note = Variant of serine peptidase from Bacillus sinesaloumensis
MADQASQANGNQDVIEGELIVSVEPKNGKPDVSIQSAQSVTGQEDVLKSKGFTIVDTLHVEDSSVKPLVSKNFNKKVVEKMGLVYLVQYSPDQFKSSNIAKKELRKELMDLGFKVRYISENYKMMAIEGTATLQGVNPLQVWAYNMIKAPEAWAITGGSLSVKVAVLDTGIDHNHPSLANFVNTNLGRSFVGGNTMDVQGHGTHVAGTIASYGPVSGVMQSATLIPVKVLDNSGSGSLYGITQGILYAADIDADVINMSLGGGGYNQGMDEATQTAVAMGTIVVAATGNDGASSISYPAAYSSVIAVGSVDQNRVRSSFSNYGDGLELMAPGSNIYSTYPNGRYRTLSGTSMATPHVAGVAGLIRAANPDIVVAQARQILRDTAQEAGSFTQYGYGIVDAHAAVVAASGGSGG

SEQ ID NO: 1707 - DNA, 1239 bp, synthetic construct
  misc_feature 1..1239: note = Variant of serine peptidase from Bacillus sinesaloumensis
  source 1..1239: mol_type = other DNA
atggcggatcaagcaagtcaagcaaacggaaaccaggacgtcattgaaggcgagctgatcgtttcagtggaaccgaagaacggtaaacctgatgtgagcattcaaagtgcacaatccgtaacagggcaggaagacgtccttaaatcgaaaggctttacgatcgttgataccttgcatgtagaggatagcagcgtcaagccactcgtctcgaagaatttcaataagaaagtggtggagaagatgggactggtgtatcttgttcaatactctccggaccagtttaaaagttccaacattgcgaagaaagaactcagaaaagaattgatggatctgggctttaaagtccgctatataagcgaaaattacaagatgatggcgatcgaaggtacagccactcttcagggggtgaatcctctgcaagtttgggcgtatgaaatgattaaagctccggaagcgtgggctattacgggcggatccctgagcgttaaagtagcagtcctggatacagggatcgaccataatcacccatccttggccaacttcgtgaatactaatcttggccgctcgtttgttggaggaaacaccatggatgttcaaggtcatggcacacatgttgctggcacgattgcatcttatgggccggtaagcggagtgatgcagcaggcgacactgatcccggtcaaagtgctcgataattctggcagcgggtccctttacggtattacgcagggcatattgtatgccgccgacatcgatgcagacgtcattaacatgtctctgggtggaggaggctataatcagggcatggatgaggctctgcaaacagcagttgctatgggaaccattgtagtagcagcgactggcaatgatggtgcatcgtcgatcagttatcctgctgcctacagcagcgtcattgcggtgggatctgtggaccaaaatcgtgttcgatcctcgttttctaactatggatctgggcttgaagtgatggcaccgggcagcaacatctacagtacgtatcctaatggcagatatcgcacgttgagtggtacaagcatggctactccgcacgttgcgggcgtagctgggctcattcgcgcagccaacccagacataagtgtcgcgcaagcccgtcagattctgcgggataccgcgcaagaagcaggatcgttcacacagtacggctatggaatcgtcgatgctcatgccgccgttgttgctgcatccggtggttcgggcggc

SEQ ID NO: 1708 - protein, 413 aa, synthetic construct; identical to SEQ ID NO: 1640
  REGION 1..413: note = Variant of serine peptidase from Bacillus sinesaloumensis

SEQ ID NO: 1709 - DNA, 1239 bp, synthetic construct
  misc_feature 1..1239: note = Variant of serine peptidase from Bacillus sinesaloumensis
  source 1..1239: mol_type = other DNA
atggcagatcaagcgagtcaagctaatggaaaccaggacgtcattgaaggcgagctgatcgtttcagtggaaccgaagaacggtaaacctgatgtgagcattcaaagtgcacaatccgtaacagggcaggaagacgtccttaaatcgaaaggctttacgatcgttgataccttgcatgtagaggatagcagcgtcaagccactcgtctcgaagaatttcaataagaaagtggtggagaagatgggactggtgtatcttgttcaatactctccggaccagtttaaaagttccaacattgcgaagaaagaactcagaaaagaattgatggatctgggctttaaagtccgctatataagcgaaaattacaagatgatggcgatcgaaggtacagccactcttcagggggtgaatcctctgcaagtttgggcgtatgaaatgattaaagctccggaagcgtgggctattacgggcggatccctgagcgttaaagtagcagtcctggatacagggatcgaccataatcacccatccttggccaacttcgtgaatactaatcttggccgctcgtttgttggaggaaacaccatggatgttcaaggtcatggcacacatgttgctggcacgattgcatcttatgggccggtaagcggagtgatgcagcaggcgacactgatcccggtcaaagtgctcgataattctggcagcgggtccctttacggtattacgcagggcatattgtatgccgccgacatcgatgcagacgtcattaacatgtctctgggtggaggaggctataatcagggcatggatgaggctctgcaaacagcagttgctatgggaaccattgtagtagcagcgactggcaatgatggtgcatcgtcgatcagttatcctgctgcctacagcagcgtcattgcggtgggatctgtggaccaaaatcgtgttcgatcctcgttttctaactatggatctgggcttgaagtgatggcaccgggcagcaacatctacagtacgtatcctaatggcagatatcgcacgttgagtggtacaagcatggctactccgcacgttgcgggcgtagctgggctcattcgcgcagccaacccagacataagtgtcgcgcaagcccgtcagattctgcgggataccgcgcaagaagcaggatcgttcacacagtacggctatggaatcgtcgatgctcatgccgccgttgttgctgcatccggtggttcgggcggc

SEQ ID NO: 1710 - protein, 413 aa, synthetic construct; identical to SEQ ID NO: 1640
  REGION 1..413: note = Variant of serine peptidase from Bacillus sinesaloumensis

SEQ ID NO: 1711 - DNA, 1239 bp, synthetic construct; identical to SEQ ID NO: 555
  misc_feature 1..1239: note = Variant of serine peptidase from Bacillus sinesaloumensis
  source 1..1239: mol_type = other DNA

SEQ ID NO: 1712 - protein, 413 aa, synthetic construct; identical to SEQ ID NO: 556
  REGION 1..413: note = Variant of serine peptidase from Bacillus sinesaloumensis

SEQ ID NO: 1713 - DNA, 1239 bp, synthetic construct
  misc_feature 1..1239: note = Variant of serine peptidase from Bacillus sinesaloumensis
  source 1..1239: mol_type = other DNA
atggcagatcaagctagtcaagctaatggaaaccaggacgtcattgaaggcgagctgatcgtttcagtggaaccgaagaacggtaaacctgatgtgagcattcaaagtgcacaatccgtaacagggcaggaagacgtccttaaatcgaaaggctttacgatcgttgataccttgcatgtagaggatagcagcgtcaagccactcgtctcgaagaatttcaataagaaagtggtggagaagatgggactggtgtatcttgttcaatactctccggaccagtttaaaagttccaacattgcgaagaaagaactcagaaaagaattgatggatctgggctttaaagtccgctatataagcgaaaattacaagatgatggcgatcgaaggtacagccactcttcagtctgtacaccctaaccaaaactggcattataatatgattaaagctccggaagcgtgggctattacgtctggatcctctagcgttaaagtagcagtcctggatacagggatcgaccataatcacccatccttggccaacttcgtgaatactaatcttggccggtcgtttgttggaggaaacaccatggatgttcaaggtcatggcacacatgttgctggcacgattgcatcttatgggagtgtaagcggagtgatgcagagtgcgacactgatcccggtcaaagtgctcgataattctggcagcgggtccctttacggtattacgcaaggcatattgtatgccgccgacatcgatgcggacgtcattaacatgtctctgggtggaggaggctataatcagagcatggatgaggctgttcaaacagcagttgctcagggaaccattgtagtagcagcgactggcaatgatggtgcatcgtcgatcagttatcctgctgcctacagcagcgtcattgcggtgggatctgtgacgtccaatcgtacacgatcctcgttttctaactatggatctgggcttgaagttatggcaccgggcagcaacatctacagtacgtatcctaattccagatatacatctttgagtggtacaagcatggctactccgcacgttgcgggcgtagctgggctcattcgcgcagccaacccagacatatctgtcgcgcaagcccgtcagattctgcgggataccgcgcaagaagcaggatcgttcacacagtacggctatggaatcgtcgatgctcatgccgccgttgttgctgcatccggtggtagcggcggc

SEQ ID NO: 1714 - protein, 413 aa, synthetic construct; identical to SEQ ID NO: 118
  REGION 1..413: note = Variant of serine peptidase from Bacillus sinesaloumensis

SEQ ID NO: 1715 - DNA, 1239 bp, synthetic construct
  misc_feature 1..1239: note = Variant of serine peptidase from Bacillus sinesaloumensis
  source 1..1239: mol_type = other DNA
atggcagatcaagctagtcaagctaatggaaaccaggacgtcattgaaggcgagctgatcgtttcagtggaaccgaagaacggtaaacctgatgtgagcattcaaagtgcacaatccgtaacagggcaggaagacgtccttaaatcgaaaggctttacgatcgttgataccttgcatgtagaggatagcagcgtcaagccactcgtctcgaagaatttcaataagaaagtggtggagaagatgggactggtgtatcttgttcaatactctccggaccagtttaaaagttccaacattgcgaagaaagaactcagaaaagaattgatggatctgggctttaaagtccgctatataagcgaaaattacaagatgatggcgatcgaaggtacagccactcttcaggttgtacaccctaaccaaaactggcattataatatgattaaagctccggaagcgtgggctattacgtctggatcctctagcgttaaagtagcagtcctggatacagggatcgaccataatcacccatccttggccaacttcgtgaatactaatcttggccggtcgtttgttggaggaaacaccatggatgttcaaggtcatggcacacatgttgctggcacgattgcatcttatgggagtgtaagcggagtgatgcagagtgcgacactgatcccggtcaaagtgctcgataattctggcagcgggtccctttacggtattacgcaaggcatattgtatgccgccgacatcgatgcggacgtcattaacatgtctctgggtggaggaggctataatcagagcatggatgaggctgttcaaacagcagttgctcagggaaccattgtagtagcagcgactggcaatgatggtgcatcgtcgatcagttatcctgctgcctacagcagcgtcattgcggtgggatctgtgacgtccaatcgtacacgatcctcgttttctaactatggatctgggcttgaagttatggcaccgggcagcaacatctacagtacgtatcctaattccagatatacatctttgagtggtacaagcatggctactccgcacgttgcgggcgtagctgggctcattcgcgcagccaacccagacatatctgtcgcgcaagcccgtcagattctgcgggataccgcgcaagaagcaggatcgttcacacagtacggctatggaatcgtcgatgctcatgccgccgttgttgctgcatccggtggtagcggcggc

SEQ ID NO: 1716 - protein, 413 aa, synthetic construct; identical to SEQ ID NO: 212
  REGION 1..413: note = Variant of serine peptidase from Bacillus sinesaloumensis

SEQ ID NO: 1717 - DNA, 1239 bp, synthetic construct
  misc_feature 1..1239: note = Variant of serine peptidase from Bacillus sinesaloumensis
  source 1..1239: mol_type = other DNA
atggcagatcaagctagtcaagctaatggaaaccaggacgtcattgaaggcgagctgatcgtttcagtggaaccgaagaacggtaaacctgatgtgagcattcaaagtgcacaatccgtaacagggcaggaagacgtccttaaatcgaaaggctttacgatcgttgataccttgcatgtagaggatagcagcgtcaagccactcgtctcgaagaatttcaataagaaagtggtggagaagatgggactggtgtatcttgttcaatactctccggaccagtttaaaagttccaacattgcgaagaaagaactcagaaaagaattgatggatctgggctttaaagtccgctatataagcgaaaattacaagatgatggcgatcgaaggtacagccactcttcagcttgtacaccctaaccaaaactggcattataatatgattaaagctccggaagcgtgggctattacgtctggatcctctagcgttaaagtagcagtcctggatacagggatcgaccataatcacccatccttggccaacttcgtgaatactaatcttggccggtcgtttgttggaggaaacaccatggatgttcaaggtcatggcacacatgttgctggcacgattgcatcttatgggagtgtaagcggagtgatgcagagtgcgacactgatcccggtcaaagtgctcgataattctggcagcgggtccctttacggtattacgcaaggcatattgtatgccgccgacatcgatgcggacgtcattaacatgtctctgggtggaggaggctataatcagagcatggatgaggctgttcaaacagcagttgctcagggaaccattgtagtagcagcgactggcaatgatggtgcatcgtcgatcagttatcctgctgcctacagcagcgtcattgcggtgggatctgtgacgtccaatcgtacacgatcctcgttttctaactatggatctgggcttgaagttatggcaccgggcagcaacatctacagtacgtatcctaattccagatatacatctttgagtggtacaagcatggctactccgcacgttgcgggcgtagctgggctcattcgcgcagccaacccagacatatctgtcgcgcaagcccgtcagattctgcgggataccgcgcaagaagcaggatcgttcacacagtacggctatggaatcgtcgatgctcatgccgccgttgttgctgcatccggtggtagcggcggc

SEQ ID NO: 1718 - protein, 413 aa, synthetic construct; identical to SEQ ID NO: 436
  REGION 1..413: note = Variant of serine peptidase from Bacillus sinesaloumensis

SEQ ID NO: 1719 - DNA, 1239 bp, synthetic construct; identical to SEQ ID NO: 147
  misc_feature 1..1239: note = Variant of serine peptidase from Bacillus sinesaloumensis
  source 1..1239: mol_type = other DNA

SEQ ID NO: 1720 - protein, 413 aa, synthetic construct; identical to SEQ ID NO: 148
  REGION 1..413: note = Variant of serine peptidase from Bacillus sinesaloumensis

SEQ ID NO: 1721 - DNA, 1239 bp, synthetic construct; identical to SEQ ID NO: 577
  misc_feature 1..1239: note = Variant of serine peptidase from Bacillus sinesaloumensis
  source 1..1239: mol_type = other DNA

SEQ ID NO: 1722 - protein, 413 aa, synthetic construct; identical to SEQ ID NO: 578
  REGION 1..413: note = Variant of serine peptidase from Bacillus sinesaloumensis

SEQ ID NO: 1723 - DNA, 1239 bp, synthetic construct; identical to SEQ ID NO: 261
  misc_feature 1..1239: note = Variant of serine peptidase from Bacillus sinesaloumensis
  source 1..1239: mol_type = other DNA

SEQ ID NO: 1724 - protein, 413 aa, synthetic construct; identical to SEQ ID NO: 262
  REGION 1..413: note = Variant of serine peptidase from Bacillus sinesaloumensis

SEQ ID NO: 1725 - DNA, 1239 bp, synthetic construct
  misc_feature 1..1239: note = Variant of serine peptidase from Bacillus sinesaloumensis
  source 1..1239: mol_type = other DNA
atggcagatcaagctagtcaagctaatggaaaccaggacgtcattgaaggcgagctgatcgtttcagtggaaccgaagaacggtaaacctgatgtgagcattcaaagtgcacaatccgtaacagggcaggaagacgtccttaaatcgaaaggctttacgatcgttgataccttgcatgtagaggatagcagcgtcaagccactcgtctcgaagaatttcaataagaaagtggtggagaagatgggactggtgtatcttgttcaatactctccggaccagtttaaaagttccaacattgcgaagaaagaactcagaaaagaattgatggatctgggctttaaagtccgctatataagcgaaaattacaagatgatggcgatcgaaggtacagccactcttcagcatgtacaccctaaccaaaactggcattataatatgattaaagctccggaagcgtgggctattacgtctggatcctctagcgttaaagtagcagtcctggatacagggatcgaccataatcacccatccttggccaacttcgtgaatactaatcttggccggtcgtttgttggaggaaacaccatggatgttcaaggtcatggcacacatgttgctggcacgattgcatcttatgggagtgtaagcggagtgatgcagagtgcgacactgatcccggtcaaagtgctcgataattctggcagcgggtccctttacggtattacgcaaggcatattgtatgccgccgacatcgatgcggacgtcattaacatgtctctgggtggaggaggctataatcagagcatggatgaggctgttcaaacagcagttgctcagggaaccattgtagtagcagcgactggcaatgatggtgcatcgtcgatcagttatcctgctgcctacagcagcgtcattgcggtgggatctgtgacgtccaatcgtacacgatcctcgttttctaactatggatctgggcttgaagttatggcaccgggcagcaacatctacagtacgtatcctaattccagatatacatctttgagtggtacaagcatggctactccgcacgttgcgggcgtagctgggctcattcgcgcagccaacccagacatatctgtcgcgcaagcccgtcagattctgcgggataccgcgcaagaagcaggatcgttcacacagtacggctatggaatcgtcgatgctcatgccgccgttgttgctgcatccggtggtagcggcggc

SEQ ID NO: 1726 - protein, 413 aa, synthetic construct
  REGION 1..413: note = Variant of serine peptidase from Bacillus sinesaloumensis
MADQASQANGNQDVIEGELIVSVEPKNGKPDVSIQSAQSVTGQEDVLKSKGFTIVDTLHVEDSSVKPLVSKNFNKKVVEKMGLVYLVQYSPDQFKSSNIAKKELRKELMDLGFKVRYISENYKMMAIEGTATLQHVHPNQNWHYNMIKAPEAWAITSGSSSVKVAVLDTGIDHNHPSLANFVNTNLGRSFVGGNTMDVQGHGTHVAGTIASYGSVSGVMQSATLIPVKVLDNSGSGSLYGITQGILYAADIDADVINMSLGGGGYNQSMDEAVQTAVAQGTIVVAATGNDGASSISYPAAYSSVIAVGSVTSNRTRSSFSNYGSGLEVMAPGSNIYSTYPNSRYTSLSGTSMATPHVAGVAGLIRAANPDISVAQARQILRDTAQEAGSFTQYGYGIVDAHAAVVAASGGSGG

SEQ ID NO: 1727 - DNA, 1239 bp, synthetic construct; identical to SEQ ID NO: 11
  misc_feature 1..1239: note = Variant of serine peptidase from Bacillus sinesaloumensis
  source 1..1239: mol_type = other DNA

SEQ ID NO: 1728 - protein, 413 aa, synthetic construct; identical to SEQ ID NO: 12
  REGION 1..413: note = Variant of serine peptidase from Bacillus sinesaloumensis

SEQ ID NO: 1729 - DNA, 1239 bp, synthetic construct; identical to SEQ ID NO: 143
  misc_feature 1..1239: note = Variant of serine peptidase from Bacillus sinesaloumensis
  source 1..1239: mol_type = other DNA

SEQ ID NO: 1730 - protein, 413 aa, synthetic construct; identical to SEQ ID NO: 144
  REGION 1..413: note = Variant of serine peptidase from Bacillus sinesaloumensis

SEQ ID NO: 1731 - DNA, 1239 bp, synthetic construct; identical to SEQ ID NO: 569
  misc_feature 1..1239: note = Variant of serine peptidase from Bacillus sinesaloumensis
  source 1..1239: mol_type = other DNA

SEQ ID NO: 1732 - protein, 413 aa, synthetic construct; identical to SEQ ID NO: 570
  REGION 1..413: note = Variant of serine peptidase from Bacillus sinesaloumensis

SEQ ID NO: 1733 - DNA, 1239 bp, synthetic construct
  misc_feature 1..1239: note = Variant of serine peptidase from Bacillus sinesaloumensis
  source 1..1239: mol_type = other DNA
atggcagatcaagctagtcaagctaatggaaaccaggacgtcattgaaggcgagctgatcgtttcagtggaaccgaagaacggtaaacctgatgtgagcattcaaagtgcacaatccgtaacagggcaggaagacgtccttaaatcgaaaggctttacgatcgttgataccttgcatgtagaggatagcagcgtcaagccactcgtctcgaagaatttcaataagaaagtggtggagaagatgggactggtgtatcttgttcaatactctccggaccagtttaaaagttccaacattgcgaagaaagaactcagaaaagaattgatggatctgggctttaaagtccgctatataagcgaaaattacaagatgatggcgatcgaaggtacagccactcttcagtgggtacaccctaaccaaaactggcattataatatgattaaagctccggaagcgtgggctattacgtctggatcctctagcgttaaagtagcagtcctggatacagggatcgaccataatcacccatccttggccaacttcgtgaatactaatcttggccggtcgtttgttggaggaaacaccatggatgttcaaggtcatggcacacatgttgctggcacgattgcatcttatgggagtgtaagcggagtgatgcagagtgcgacactgatcccggtcaaagtgctcgataattctggcagcgggtccctttacggtattacgcaaggcatattgtatgccgccgacatcgatgcggacgtcattaacatgtctctgggtggaggaggctataatcagagcatggatgaggctgttcaaacagcagttgctcagggaaccattgtagtagcagcgactggcaatgatggtgcatcgtcgatcagttatcctgctgcctacagcagcgtcattgcggtgggatctgtgacgtccaatcgtacacgatcctcgttttctaactatggatctgggcttgaagttatggcaccgggcagcaacatctacagtacgtatcctaattccagatatacatctttgagtggtacaagcatggctactccgcacgttgcgggcgtagctgggctcattcgcgcagccaacccagacatatctgtcgcgcaagcccgtcagattctgcgggataccgcgcaagaagcaggatcgttcacacagtacggctatggaatcgtcgatgctcatgccgccgttgttgctgcatccggtggtagcggcggc

SEQ ID NO: 1734 - protein, 413 aa, synthetic construct
  REGION 1..413: note = Variant of serine peptidase from Bacillus sinesaloumensis
MADQASQANGNQDVIEGELIVSVEPKNGKPDVSIQSAQSVTGQEDVLKSKGFTIVDTLHVEDSSVKPLVSKNFNKKVVEKMGLVYLVQYSPDQFKSSNIAKKELRKELMDLGFKVRYISENYKMMAIEGTATLQWVHPNQNWHYNMIKAPEAWAITSGSSSVKVAVLDTGIDHNHPSLANFVNTNLGRSFVGGNTMDVQGHGTHVAGTIASYGSVSGVMQSATLIPVKVLDNSGSGSLYGITQGILYAADIDADVINMSLGGGGYNQSMDEAVQTAVAQGTIVVAATGNDGASSISYPAAYSSVIAVGSVTSNRTRSSFSNYGSGLEVMAPGSNIYSTYPNSRYTSLSGTSMATPHVAGVAGLIRAANPDISVAQARQILRDTAQEAGSFTQYGYGIVDAHAAVVAASGGSGG

SEQ ID NO: 1735 - DNA, 1239 bp, synthetic construct
  misc_feature 1..1239: note = Variant of serine peptidase from Bacillus sinesaloumensis
  source 1..1239: mol_type = other DNA
atggcagatcaagctagtcaagctaatggaaaccaggacgtcattgaaggcgagctgatcgtttcagtggaaccgaagaacggtaaacctgatgtgagcattcaaagtgcacaatccgtaacagggcaggaagacgtccttaaatcgaaaggctttacgatcgttgataccttgcatgtagaggatagcagcgtcaagccactcgtctcgaagaatttcaataagaaagtggtggagaagatgggactggtgtatcttgttcaatactctccggaccagtttaaaagttccaacattgcgaagaaagaactcagaaaagaattgatggatctgggctttaaagtccgctatataagcgaaaattacaagatgatggcgatcgaaggtacagccactcttcagatggtacaccctaaccaaaactggcattataatatgattaaagctccggaagcgtgggctattacgtctggatcctctagcgttaaagtagcagtcctggatacagggatcgaccataatcacccatccttggccaacttcgtgaatactaatcttggccggtcgtttgttggaggaaacaccatggatgttcaaggtcatggcacacatgttgctggcacgattgcatcttatgggagtgtaagcggagtgatgcagagtgcgacactgatcccggtcaaagtgctcgataattctggcagcgggtccctttacggtattacgcaaggcatattgtatgccgccgacatcgatgcggacgtcattaacatgtctctgggtggaggaggctataatcagagcatggatgaggctgttcaaacagcagttgctcagggaaccattgtagtagcagcgactggcaatgatggtgcatcgtcgatcagttatcctgctgcctacagcagcgtcattgcggtgggatctgtgacgtccaatcgtacacgatcctcgttttctaactatggatctgggcttgaagttatggcaccgggcagcaacatctacagtacgtatcctaattccagatatacatctttgagtggtacaagcatggctactccgcacgttgcgggcgtagctgggctcattcgcgcagccaacccagacatatctgtcgcgcaagcccgtcagattctgcgggataccgcgcaagaagcaggatcgttcacacagtacggctatggaatcgtcgatgctcatgccgccgttgttgctgcatccggtggtagcggcggc

SEQ ID NO: 1736 - protein, 413 aa, synthetic construct
  REGION 1..413: note = Variant of serine peptidase from Bacillus sinesaloumensis
MADQASQANGNQDVIEGELIVSVEPKNGKPDVSIQSAQSVTGQEDVLKSKGFTIVDTLHVEDSSVKPLVSKNFNKKVVEKMGLVYLVQYSPDQFKSSNIAKKELRKELMDLGFKVRYISENYKMMAIEGTATLQMVHPNQNWHYNMIKAPEAWAITSGSSSVKVAVLDTGIDHNHPSLANFVNTNLGRSFVGGNTMDVQGHGTHVAGTIASYGSVSGVMQSATLIPVKVLDNSGSGSLYGITQGILYAADIDADVINMSLGGGGYNQSMDEAVQTAVAQGTIVVAATGNDGASSISYPAAYSSVIAVGSVTSNRTRSSFSNYGSGLEVMAPGSNIYSTYPNSRYTSLSGTSMATPHVAGVAGLIRAANPDISVAQARQILRDTAQEAGSFTQYGYGIVDAHAAVVAASGGSGG

SEQ ID NO: 1737 - DNA, 1239 bp, synthetic construct
  misc_feature 1..1239: note = Variant of serine peptidase from Bacillus sinesaloumensis
  source 1..1239: mol_type = other DNA
atggcagatcaagctagtcaagctaatggaaaccaggacgtcattgaaggcgagctgatcgtttcagtggaaccgaagaacggtaaacctgatgtgagcattcaaagtgcacaatccgtaacagggcaggaagacgtccttaaatcgaaaggctttacgatcgttgataccttgcatgtagaggatagcagcgtcaagccactcgtctcgaagaatttcaataagaaagtggtggagaagatgggactggtgtatcttgttcaatactctccggaccagtttaaaagttccaacattgcgaagaaagaactcagaaaagaattgatggatctgggctttaaagtccgctatataagcgaaaattacaagatgatggcgatcgaaggtacagccactcttcagaatgtacaccctaaccaaaactggcattataatatgattaaagctccggaagcgtgggctattacgtctggatcctctagcgttaaagtagcagtcctggatacagggatcgaccataatcacccatccttggccaacttcgtgaatactaatcttggccggtcgtttgttggaggaaacaccatggatgttcaaggtcatggcacacatgttgctggcacgattgcatcttatgggagtgtaagcggagtgatgcagagtgcgacactgatcccggtcaaagtgctcgataattctggcagcgggtccctttacggtattacgcaaggcatattgtatgccgccgacatcgatgcggacgtcattaacatgtctctgggtggaggaggctataatcagagcatggatgaggctgttcaaacagcagttgctcagggaaccattgtagtagcagcgactggcaatgatggtgcatcgtcgatcagttatcctgctgcctacagcagcgtcattgcggtgggatctgtgacgtccaatcgtacacgatcctcgttttctaactatggatctgggcttgaagttatggcaccgggcagcaacatctacagtacgtatcctaattccagatatacatctttgagtggtacaagcatggctactccgcacgttgcgggcgtagctgggctcattcgcgcagccaacccagacatatctgtcgcgcaagcccgtcagattctgcgggataccgcgcaagaagcaggatcgttcacacagtacggctatggaatcgtcgatgctcatgccgccgttgttgctgcatccggtggtagcggcggc

SEQ ID NO: 1738 - protein, 413 aa, synthetic construct
  REGION 1..413: note = Variant of serine peptidase from Bacillus sinesaloumensis
MADQASQANGNQDVIEGELIVSVEPKNGKPDVSIQSAQSVTGQEDVLKSKGFTIVDTLHVEDSSVKPLVSKNFNKKVVEKMGLVYLVQYSPDQFKSSNIAKKELRKELMDLGFKVRYISENYKMMAIEGTATLQNVHPNQNWHYNMIKAPEAWAITSGSSSVKVAVLDTGIDHNHPSLANFVNTNLGRSFVGGNTMDVQGHGTHVAGTIASYGSVSGVMQSATLIPVKVLDNSGSGSLYGITQGILYAADIDADVINMSLGGGGYNQSMDEAVQTAVAQGTIVVAATGNDGASSISYPAAYSSVIAVGSVTSNRTRSSFSNYGSGLEVMAPGSNIYSTYPNSRYTSLSGTSMATPHVAGVAGLIRAANPDISVAQARQILRDTAQEAGSFTQYGYGIVDAHAAVVAASGGSGG

SEQ ID NO: 1739 - DNA, 1239 bp, synthetic construct
  misc_feature 1..1239: note = Variant of serine peptidase from Bacillus sinesaloumensis
  source 1..1239: mol_type = other DNA
atggcagatcaagctagtcaagctaatggaaaccaggacgtcattgaaggcgagctgatcgtttcagtggaaccgaagaacggtaaacctgatgtgagcattcaaagtgcacaatccgtaacagggcaggaagacgtccttaaatcgaaaggctttacgatcgttgataccttgcatgtagaggatagcagcgtcaagccactcgtctcgaagaatttcaataagaaagtggtggagaagatgggactggtgtatcttgttcaatactctccggaccagtttaaaagttccaacattgcgaagaaagaactcagaaaagaattgatggatctgggctttaaagtccgctatataagcgaaaattacaagatgatggcgatcgaaggtacagccactcttcaggcagtatcgcctaaccaaaactggcattataatatgattaaagctccggaagcgtgggctattacgtctggatcctctagcgttaaagtagcagtcctggatacagggatcgaccataatcacccatccttggccaacttcgtgaatactaatcttggccggtcgtttgttggaggaaacaccatggatgttcaaggtcatggcacacatgttgctggcacgattgcatcttatgggagtgtaagcggagtgatgcagagtgcgacactgatcccggtcaaagtgctcgataattctggcagcgggtccctttacggtattacgcaaggcatattgtatgccgccgacatcgatgcggacgtcattaacatgtctctgggtggaggaggctataatcagagcatggatgaggctgttcaaacagcagttgctcagggaaccattgtagtagcagcgactggcaatgatggtgcatcgtcgatcagttatcctgctgcctacagcagcgtcattgcggtgggatctgtgacgtccaatcgtacacgatcctcgttttctaactatggatctgggcttgaagttatggcaccgggcagcaacatctacagtacgtatcctaattccagatatacatctttgagtggtacaagcatggctactccgcacgttgcgggcgtagctgggctcattcgcgcagccaacccagacatatctgtcgcgcaagcccgtcagattctgcgggataccgcgcaagaagcaggatcgttcacacagtacggctatggaatcgtcgatgctcatgccgccgttgttgctgcatccggtggtagcggcggc

SEQ ID NO: 1740 - protein, 413 aa, synthetic construct
  REGION 1..413: note = Variant of serine peptidase from Bacillus sinesaloumensis
MADQASQANGNQDVIEGELIVSVEPKNGKPDVSIQSAQSVTGQEDVLKSKGFTIVDTLHVEDSSVKPLVSKNFNKKVVEKMGLVYLVQYSPDQFKSSNIAKKELRKELMDLGFKVRYISENYKMMAIEGTATLQAVSPNQNWHYNMIKAPEAWAITSGSSSVKVAVLDTGIDHNHPSLANFVNTNLGRSFVGGNTMDVQGHGTHVAGTIASYGSVSGVMQSATLIPVKVLDNSGSGSLYGITQGILYAADIDADVINMSLGGGGYNQSMDEAVQTAVAQGTIVVAATGNDGASSISYPAAYSSVIAVGSVTSNRTRSSFSNYGSGLEVMAPGSNIYSTYPNSRYTSLSGTSMATPHVAGVAGLIRAANPDISVAQARQILRDTAQEAGSFTQYGYGIVDAHAAVVAASGGSGG

SEQ ID NO: 1741 - DNA, 1239 bp, synthetic construct
  misc_feature 1..1239: note = Variant of serine peptidase from Bacillus sinesaloumensis
  source 1..1239: mol_type = other DNA
atggcagatcaagctagtcaagctaatggaaaccaggacgtcattgaaggcgagctgatcgtttcagtggaaccgaagaacggtaaacctgatgtgagcattcaaagtgcacaatccgtaacagggcaggaagacgtccttaaatcgaaaggctttacgatcgttgataccttgcatgtagaggatagcagcgtcaagccactcgtctcgaagaatttcaataagaaagtggtggagaagatgggactggtgtatcttgttcaatactctccggaccagtttaaaagttccaacattgcgaagaaagaactcagaaaagaattgatggatctgggctttaaagtccgctatataagcgaaaattacaagatgatggcgatcgaaggtacagccactcttcaggcagtagcgcctaaccaaaactggcattataatatgattaaagctccggaagcgtgggctattacgtctggatcctctagcgttaaagtagcagtcctggatacagggatcgaccataatcacccatccttggccaacttcgtgaatactaatcttggccggtcgtttgttggaggaaacaccatggatgttcaaggtcatggcacacatgttgctggcacgattgcatcttatgggagtgtaagcggagtgatgcagagtgcgacactgatcccggtcaaagtgctcgataattctggcagcgggtccctttacggtattacgcaaggcatattgtatgccgccgacatcgatgcggacgtcattaacatgtctctgggtggaggaggctataatcagagcatggatgaggctgttcaaacagcagttgctcagggaaccattgtagtagcagcgactggcaatgatggtgcatcgtcgatcagttatcctgctgcctacagcagcgtcattgcggtgggatctgtgacgtccaatcgtacacgatcctcgttttctaactatggatctgggcttgaagttatggcaccgggcagcaacatctacagtacgtatcctaattccagatatacatctttgagtggtacaagcatggctactccgcacgttgcgggcgtagctgggctcattcgcgcagccaacccagacatatctgtcgcgcaagcccgtcagattctgcgggataccgcgcaagaagcaggatcgttcacacagtacggctatggaatcgtcgatgctcatgccgccgttgttgctgcatccggtggtagcggcggc

SEQ ID NO: 1742 - protein, 413 aa, synthetic construct
  REGION 1..413: note = Variant of serine peptidase from Bacillus sinesaloumensis
MADQASQANGNQDVIEGELIVSVEPKNGKPDVSIQSAQSVTGQEDVLKSKGFTIVDTLHVEDSSVKPLVSKNFNKKVVEKMGLVYLVQYSPDQFKSSNIAKKELRKELMDLGFKVRYISENYKMMAIEGTATLQAVAPNQNWHYNMIKAPEAWAITSGSSSVKVAVLDTGIDHNHPSLANFVNTNLGRSFVGGNTMDVQGHGTHVAGTIASYGSVSGVMQSATLIPVKVLDNSGSGSLYGITQGILYAADIDADVINMSLGGGGYNQSMDEAVQTAVAQGTIVVAATGNDGASSISYPAAYSSVIAVGSVTSNRTRSSFSNYGSGLEVMAPGSNIYSTYPNSRYTSLSGTSMATPHVAGVAGLIRAANPDISVAQARQILRDTAQEAGSFTQYGYGIVDAHAAVVAASGGSGG

SEQ ID NO: 1743 - DNA, 1239 bp, synthetic construct
  misc_feature 1..1239: note = Variant of serine peptidase from Bacillus sinesaloumensis
  source 1..1239: mol_type = other DNA
atggcagatcaagctagtcaagctaatggaaaccaggacgtcattgaaggcgagctgatcgtttcagtggaaccgaagaacggtaaacctgatgtgagcattcaaagtgcacaatccgtaacagggcaggaagacgtccttaaatcgaaaggctttacgatcgttgataccttgcatgtagaggatagcagcgtcaagccactcgtctcgaagaatttcaataagaaagtggtggagaagatgggactggtgtatcttgttcaatactctccggaccagtttaaaagttccaacattgcgaagaaagaactcagaaaagaattgatggatctgggctttaaagtccgctatataagcgaaaattacaagatgatggcgatcgaaggtacagccactcttcaggcagtaaatcctaaccaaaactggcattataatatgattaaagctccggaagcgtgggctattacgtctggatcctctagcgttaaagtagcagtcctggatacagggatcgaccataatcacccatccttggccaacttcgtgaatactaatcttggccggtcgtttgttggaggaaacaccatggatgttcaaggtcatggcacacatgttgctggcacgattgcatcttatgggagtgtaagcggagtgatgcagagtgcgacactgatcccggtcaaagtgctcgataattctggcagcgggtccctttacggtattacgcaaggcatattgtatgccgccgacatcgatgcggacgtcattaacatgtctctgggtggaggaggctataatcagagcatggatgaggctgttcaaacagcagttgctcagggaaccattgtagtagcagcgactggcaatgatggtgcatcgtcgatcagttatcctgctgcctacagcagcgtcattgcggtgggatctgtgacgtccaatcgtacacgatcctcgttttctaactatggatctgggcttgaagttatggcaccgggcagcaacatctacagtacgtatcctaattccagatatacatctttgagtggtacaagcatggctactccgcacgttgcgggcgtagctgggctcattcgcgcagccaacccagacatatctgtcgcgcaagcccgtcagattctgcgggataccgcgcaagaagcaggatcgttcacacagtacggctatggaatcgtcgatgctcatgccgccgttgttgctgcatccggtggtagcggcggc

SEQ ID NO: 1744 - protein, 413 aa, synthetic construct
  REGION 1..413: note = Variant of serine peptidase from Bacillus sinesaloumensis
MADQASQANGNQDVIEGELIVSVEPKNGKPDVSIQSAQSVTGQEDVLKSKGFTIVDTLHVEDSSVKPLVSKNFNKKVVEKMGLVYLVQYSPDQFKSSNIAKKELRKELMDLGFKVRYISENYKMMAIEGTATLQAVNPNQNWHYNMIKAPEAWAITSGSSSVKVAVLDTGIDHNHPSLANFVNTNLGRSFVGGNTMDVQGHGTHVAGTIASYGSVSGVMQSATLIPVKVLDNSGSGSLYGITQGILYAADIDADVINMSLGGGGYNQSMDEAVQTAVAQGTIVVAATGNDGASSISYPAAYSSVIAVGSVTSNRTRSSFSNYGSGLEVMAPGSNIYSTYPNSRYTSLSGTSMATPHVAGVAGLIRAANPDISVAQARQILRDTAQEAGSFTQYGYGIVDAHAAVVAASGGSGG

SEQ ID NO: 1745 - DNA, 1239 bp, synthetic construct
  misc_feature 1..1239: note = Variant of serine peptidase from Bacillus sinesaloumensis
  source 1..1239: mol_type = other DNA
atggcagatcaagctagtcaagctaatggaaaccaggacgtcattgaaggcgagctgatcgtttcagtggaaccgaagaacggtaaacctgatgtgagcattcaaagtgcacaatccgtaacagggcaggaagacgtccttaaatcgaaaggctttacgatcgttgataccttgcatgtagaggatagcagcgtcaagccactcgtctcgaagaatttcaataagaaagtggtggagaagatgggactggtgtatcttgttcaatactctccggaccagtttaaaagttccaacattgcgaagaaagaactcagaaaagaattgatggatctgggctttaaagtccgctatataagcgaaaattacaagatgatggcgatcgaaggtacagccactcttcaggcagtagatcctaaccaaaactggcattataatatgattaaagctccggaagcgtgggctattacgtctggatcctctagcgttaaagtagcagtcctggatacagggatcgaccataatcacccatccttggccaacttcgtgaatactaatcttggccggtcgtttgttggaggaaacaccatggatgttcaaggtcatggcacacatgttgctggcacgattgcatcttatgggagtgtaagcggagtgatgcagagtgcgacactgatcccggtcaaagtgctcgataattctggcagcgggtccctttacggtattacgcaaggcatattgtatgccgccgacatcgatgcggacgtcattaacatgtctctgggtggaggaggctataatcagagcatggatgaggctgttcaaacagcagttgctcagggaaccattgtagtagcagcgactggcaatgatggtgcatcgtcgatcagttatcctgctgcctacagcagcgtcattgcggtgggatctgtgacgtccaatcgtacacgatcctcgttttctaactatggatctgggcttgaagttatggcaccgggcagcaacatctacagtacgtatcctaattccagatatacatctttgagtggtacaagcatggctactccgcacgttgcgggcgtagctgggctcattcgcgcagccaacccagacatatctgtcgcgcaagcccgtcagattctgcgggataccgcgcaagaagcaggatcgttcacacagtacggctatggaatcgtcgatgctcatgccgccgttgttgctgcatccggtggtagcggcggc

SEQ ID NO: 1746 - protein, 413 aa, synthetic construct
  REGION 1..413: note = Variant of serine peptidase from Bacillus sinesaloumensis
MADQASQANGNQDVIEGELIVSVEPKNGKPDVSIQSAQSVTGQEDVLKSKGFTIVDTLHVEDSSVKPLVSKNFNKKVVEKMGLVYLVQYSPDQFKSSNIAKKELRKELMDLGFKVRYISENYKMMAIEGTATLQAVDPNQNWHYNMIKAPEAWAITSGSSSVKVAVLDTGIDHNHPSLANFVNTNLGRSFVGGNTMDVQGHGTHVAGTIASYGSVSGVMQSATLIPVKVLDNSGSGSLYGITQGILYAADIDADVINMSLGGGGYNQSMDEAVQTAVAQGTIVVAATGNDGASSISYPAAYSSVIAVGSVTSNRTRSSFSNYGSGLEVMAPGSNIYSTYPNSRYTSLSGTSMATPHVAGVAGLIRAANPDISVAQARQILRDTAQEAGSFTQYGYGIVDAHAAVVAASGGSGG

SEQ ID NO: 1747 - DNA, 1239 bp, synthetic construct
  misc_feature 1..1239: note = Variant of serine peptidase from Bacillus sinesaloumensis
  source 1..1239: mol_type = other DNA
atggcagatcaagctagtcaagctaatggaaaccaggacgtcattgaaggcgagctgatcgtttcagtggaaccgaagaacggtaaacctgatgtgagcattcaaagtgcacaatccgtaacagggcaggaagacgtccttaaatcgaaaggctttacgatcgttgataccttgcatgtagaggatagcagcgtcaagccactcgtctcgaagaatttcaataagaaagtggtggagaagatgggactggtgtatcttgttcaatactctccggaccagtttaaaagttccaacattgcgaagaaagaactcagaaaagaattgatggatctgggctttaaagtccgctatataagcgaaaattacaagatgatggcgatcgaaggtacagccactcttcaggcagtacaccctcgtcaaaactggcattataatatgattaaagctccggaagcgtgggctattacgtctggatcctctagcgttaaagtagcagtcctggatacagggatcgaccataatcacccatccttggccaacttcgtgaatactaatcttggccggtcgtttgttggaggaaacaccatggatgttcaaggtcatggcacacatgttgctggcacgattgcatcttatgggagtgtaagcggagtgatgcagagtgcgacactgatcccggtcaaagtgctcgataattctggcagcgggtccctttacggtattacgcaaggcatattgtatgccgccgacatcgatgcggacgtcattaacatgtctctgggtggaggaggctataatcagagcatggatgaggctgttcaaacagcagttgctcagggaaccattgtagtagcagcgactggcaatgatggtgcatcgtcgatcagttatcctgctgcctacagcagcgtcattgcggtgggatctgtgacgtccaatcgtacacgatcctcgttttctaactatggatctgggcttgaagttatggcaccgggcagcaacatctacagtacgtatcctaattccagatatacatctttgagtggtacaagcatggctactccgcacgttgcgggcgtagctgggctcattcgcgcagccaacccagacatatctgtcgcgcaagcccgtcagattctgcgggataccgcgcaagaagcaggatcgttcacacagtacggctatggaatcgtcgatgctcatgccgccgttgttgctgcatccggtggtagcggcggc

SEQ ID NO: 1748 - protein, 413 aa, synthetic construct; identical to SEQ ID NO: 866
  REGION 1..413: note = Variant of serine peptidase from Bacillus sinesaloumensis

SEQ ID NO: 1749 - DNA, 1239 bp, synthetic construct
  misc_feature 1..1239: note = Variant of serine peptidase from Bacillus sinesaloumensis
  source 1..1239: mol_type = other DNA
atggcagatcaagctagtcaagctaatggaaaccaggacgtcattgaaggcgagctgatcgtttcagtggaaccgaagaacggtaaacctgatgtgagcattcaaagtgcacaatccgtaacagggcaggaagacgtccttaaatcgaaaggctttacgatcgttgataccttgcatgtagaggatagcagcgtcaagccactcgtctcgaagaatttcaataagaaagtggtggagaagatgggactggtgtatcttgttcaatactctccggaccagtttaaaagttccaacattgcgaagaaagaactcagaaaagaattgatggatctgggctttaaagtccgctatataagcgaaaattacaagatgatggcgatcgaaggtacagccactcttcaggcagtacaccctgagcaaaactggcattataatatgattaaagctccggaagcgtgggctattacgtctggatcctctagcgttaaagtagcagtcctggatacagggatcgaccataatcacccatccttggccaacttcgtgaatactaatcttggccggtcgtttgttggaggaaacaccatggatgttcaaggtcatggcacacatgttgctggcacgattgcatcttatgggagtgtaagcggagtgatgcagagtgcgacactgatcccggtcaaagtgctcgataattctggcagcgggtccctttacggtattacgcaaggcatattgtatgccgccgacatcgatgcggacgtcattaacatgtctctgggtggaggaggctataatcagagcatggatgaggctgttcaaacagcagttgctcagggaaccattgtagtagcagcgactggcaatgatggtgcatcgtcgatcagttatcctgctgcctacagcagcgtcattgcggtgggatctgtgacgtccaatcgtacacgatcctcgttttctaactatggatctgggcttgaagttatggcaccgggcagcaacatctacagtacgtatcctaattccagatatacatctttgagtggtacaagcatggctactccgcacgttgcgggcgtagctgggctcattcgcgcagccaacccagacatatctgtcgcgcaagcccgtcagattctgcgggataccgcgcaagaagcaggatcgttcacacagtacggctatggaatcgtcgatgctcatgccgccgttgttgctgcatccggtggtagcggcggc

SEQ ID NO: 1750 - protein, 413 aa, synthetic construct
  REGION 1..413: note = Variant of serine peptidase from Bacillus sinesaloumensis
MADQASQANGNQDVIEGELIVSVEPKNGKPDVSIQSAQSVTGQEDVLKSKGFTIVDTLHVEDSSVKPLVSKNFNKKVVEKMGLVYLVQYSPDQFKSSNIAKKELRKELMDLGFKVRYISENYKMMAIEGTATLQAVHPEQNWHYNMIKAPEAWAITSGSSSVKVAVLDTGIDHNHPSLANFVNTNLGRSFVGGNTMDVQGHGTHVAGTIASYGSVSGVMQSATLIPVKVLDNSGSGSLYGITQGILYAADIDADVINMSLGGGGYNQSMDEAVQTAVAQGTIVVAATGNDGASSISYPAAYSSVIAVGSVTSNRTRSSFSNYGSGLEVMAPGSNIYSTYPNSRYTSLSGTSMATPHVAGVAGLIRAANPDISVAQARQILRDTAQEAGSFTQYGYGIVDAHAAVVAASGGSGG

SEQ ID NO: 1751 - DNA, 1239 bp, synthetic construct
  misc_feature 1..1239: note = Variant of serine peptidase from Bacillus sinesaloumensis
  source 1..1239: mol_type = other DNA
atggcagatcaagctagtcaagctaatggaaaccaggacgtcattgaaggcgagctgatcgtttcagtggaaccgaagaacggtaaacctgatgtgagcattcaaagtgcacaatccgtaacagggcaggaagacgtccttaaatcgaaaggctttacgatcgttgataccttgcatgtagaggatagcagcgtcaagccactcgtctcgaagaatttcaataagaaagtggtggagaagatgggactggtgtatcttgttcaatactctccggaccagtttaaaagttccaacattgcgaagaaagaactcagaaaagaattgatggatctgggctttaaagtccgctatataagcgaaaattacaagatgatggcgatcgaaggtacagccactcttcaggcagtacacccttttcaaaactggcattataatatgattaaagctccggaagcgtgggctattacgtctggatcctctagcgttaaagtagcagtcctggatacagggatcgaccataatcacccatccttggccaacttcgtgaatactaatcttggccggtcgtttgttggaggaaacaccatggatgttcaaggtcatggcacacatgttgctggcacgattgcatcttatgggagtgtaagcggagtgatgcagagtgcgacactgatcccggtcaaagtgctcgataattctggcagcgggtccctttacggtattacgcaaggcatattgtatgccgccgacatcgatgcggacgtcattaacatgtctctgggtggaggaggctataatcagagcatggatgaggctgttcaaacagcagttgctcagggaaccattgtagtagcagcgactggcaatgatggtgcatcgtcgatcagttatcctgctgcctacagcagcgtcattgcggtgggatctgtgacgtccaatcgtacacgatcctcgttttctaactatggatctgggcttgaagttatggcaccgggcagcaacatctacagtacgtatcctaattccagatatacatctttgagtggtacaagcatggctactccgcacgttgcgggcgtagctgggctcattcgcgcagccaacccagacatatctgtcgcgcaagcccgtcagattctgcgggataccgcgcaagaagcaggatcgttcacacagtacggctatggaatcgtcgatgctcatgccgccgttgttgctgcatccggtggtagcggcggc

SEQ ID NO: 1752 - protein, 413 aa, synthetic construct
  REGION 1..413: note = Variant of serine peptidase from Bacillus sinesaloumensis
MADQASQANGNQDVIEGELIVSVEPKNGKPDVSIQSAQSVTGQEDVLKSKGFTIVDTLHVEDSSVKPLVSKNFNKKVVEKMGLVYLVQYSPDQFKSSNIAKKELRKELMDLGFKVRYISENYKMMAIEGTATLQAVHPFQNWHYNMIKAPEAWAITSGSSSVKVAVLDTGIDHNHPSLANFVNTNLGRSFVGGNTMDVQGHGTHVAGTIASYGSVSGVMQSATLIPVKVLDNSGSGSLYGITQGILYAADIDADVINMSLGGGGYNQSMDEAVQTAVAQGTIVVAATGNDGASSISYPAAYSSVIAVGSVTSNRTRSSFSNYGSGLEVMAPGSNIYSTYPNSRYTSLSGTSMATPHVAGVAGLIRAANPDISVAQARQILRDTAQEAGSFTQYGYGIVDAHAAVVAASGGSGG

SEQ ID NO: 1753 - DNA, 1239 bp, synthetic construct; identical to SEQ ID NO: 877
  misc_feature 1..1239: note = Variant of serine peptidase from Bacillus sinesaloumensis
  source 1..1239: mol_type = other DNA

SEQ ID NO: 1754 - protein, 413 aa, synthetic construct; identical to SEQ ID NO: 878
  REGION 1..413: note = Variant of serine peptidase from Bacillus sinesaloumensis

SEQ ID NO: 1755 - DNA, 1239 bp, synthetic construct; identical to SEQ ID NO: 729
  misc_feature 1..1239: note = Variant of serine peptidase from Bacillus sinesaloumensis
  source 1..1239: mol_type = other DNA

SEQ ID NO: 1756 - protein, 413 aa, synthetic construct; identical to SEQ ID NO: 730
  REGION 1..413: note = Variant of serine peptidase from Bacillus sinesaloumensis

SEQ ID NO: 1757 - DNA, 1239 bp, synthetic construct
  misc_feature 1..1239: note = Variant of serine peptidase from Bacillus sinesaloumensis
  source 1..1239: mol_type = other DNA
atggcagatcaagctagtcaagctaatggaaaccaggacgtcattgaaggcgagctgatcgtttcagtggaaccgaagaacggtaaacctgatgtgagcattcaaagtgcacaatccgtaacagggcaggaagacgtccttaaatcgaaaggctttacgatcgttgataccttgcatgtagaggatagcagcgtcaagccactcgtctcgaagaatttcaataagaaagtggtggagaagatgggactggtgtatcttgttcaatactctccggaccagtttaaaagttccaacattgcgaagaaagaactcagaaaagaattgatggatctgggctttaaagtccgctatataagcgaaaattacaagatgatggcgatcgaaggtacagccactcttcaggcagtacaccctgatcaaaactggcattataatatgattaaagctccggaagcgtgggctattacgtctggatcctctagcgttaaagtagcagtcctggatacagggatcgaccataatcacccatccttggccaacttcgtgaatactaatcttggccggtcgtttgttggaggaaacaccatggatgttcaaggtcatggcacacatgttgctggcacgattgcatcttatgggagtgtaagcggagtgatgcagagtgcgacactgatcccggtcaaagtgctcgataattctggcagcgggtccctttacggtattacgcaaggcatattgtatgccgccgacatcgatgcggacgtcattaacatgtctctgggtggaggaggctataatcagagcatggatgaggctgttcaaacagcagttgctcagggaaccattgtagtagcagcgactggcaatgatggtgcatcgtcgatcagttatcctgctgcctacagcagcgtcattgcggtgggatctgtgacgtccaatcgtacacgatcctcgttttctaactatggatctgggcttgaagttatggcaccgggcagcaacatctacagtacgtatcctaattccagatatacatctttgagtggtacaagcatggctactccgcacgttgcgggcgtagctgggctcattcgcgcagccaacccagacatatctgtcgcgcaagcccgtcagattctgcgggataccgcgcaagaagcaggatcgttcacacagtacggctatggaatcgtcgatgctcatgccgccgttgttgctgcatccggtggtagcggcggc

SEQ ID NO: 1758 - protein, 413 aa, synthetic construct
  REGION 1..413: note = Variant of serine peptidase from Bacillus sinesaloumensis
MADQASQANGNQDVIEGELIVSVEPKNGKPDVSIQSAQSVTGQEDVLKSKGFTIVDTLHVEDSSVKPLVSKNFNKKVVEKMGLVYLVQYSPDQFKSSNIAKKELRKELMDLGFKVRYISENYKMMAIEGTATLQAVHPDQNWHYNMIKAPEAWAITSGSSSVKVAVLDTGIDHNHPSLANFVNTNLGRSFVGGNTMDVQGHGTHVAGTIASYGSVSGVMQSATLIPVKVLDNSGSGSLYGITQGILYAADIDADVINMSLGGGGYNQSMDEAVQTAVAQGTIVVAATGNDGASSISYPAAYSSVIAVGSVTSNRTRSSFSNYGSGLEVMAPGSNIYSTYPNSRYTSLSGTSMATPHVAGVAGLIRAANPDISVAQARQILRDTAQEAGSFTQYGYGIVDAHAAVVAASGGSGG

SEQ ID NO: 1759 - DNA, 1239 bp, synthetic construct
  misc_feature 1..1239: note = Variant of serine peptidase from Bacillus sinesaloumensis
  source 1..1239: mol_type = other DNA
atggcagatcaagctagtcaagctaatggaaaccaggacgtcattgaaggcgagctgatcgtttcagtggaaccgaagaacggtaaacctgatgtgagcattcaaagtgcacaatccgtaacagggcaggaagacgtccttaaatcgaaaggctttacgatcgttgataccttgcatgtagaggatagcagcgtcaagccactcgtctcgaagaatttcaataagaaagtggtggagaagatgggactggtgtatcttgttcaatactctccggaccagtttaaaagttccaacattgcgaagaaagaactcagaaaagaattgatggatctgggctttaaagtccgctatataagcgaaaattacaagatgatggcgatcgaaggtacagccactcttcaggcagtacaccctcatcaaaactggcattataatatgattaaagctccggaagcgtgggctattacgtctggatcctctagcgttaaagtagcagtcctggatacagggatcgaccataatcacccatccttggccaacttcgtgaatactaatcttggccggtcgtttgttggaggaaacaccatggatgttcaaggtcatggcacacatgttgctggcacgattgcatcttatgggagtgtaagcggagtgatgcagagtgcgacactgatcccggtcaaagtgctcgataattctggcagcgggtccctttacggtattacgcaaggcatattgtatgccgccgacatcgatgcggacgtcattaacatgtctctgggtggaggaggctataatcagagcatggatgaggctgttcaaacagcagttgctcagggaaccattgtagtagcagcgactggcaatgatggtgcatcgtcgatcagttatcctgctgcctacagcagcgtcattgcggtgggatctgtgacgtccaatcgtacacgatcctcgttttctaactatggatctgggcttgaagttatggcaccgggcagcaacatctacagtacgtatcctaattccagatatacatctttgagtggtacaagcatggctactccgcacgttgcgggcgtagctgggctcattcgcgcagccaacccagacatatctgtcgcgcaagcccgtcagattctgcgggataccgcgcaagaagcaggatcgttcacacagtacggctatggaatcgtcgatgctcatgccgccgttgttgctgcatccggtggtagcggcggc

SEQ ID NO: 1760 - protein, 413 aa, synthetic construct
  REGION 1..413: note = Variant of serine peptidase from Bacillus sinesaloumensis
MADQASQANGNQDVIEGELIVSVEPKNGKPDVSIQSAQSVTGQEDVLKSKGFTIVDTLHVEDSSVKPLVSKNFNKKVVEKMGLVYLVQYSPDQFKSSNIAKKELRKELMDLGFKVRYISENYKMMAIEGTATLQAVHPHQNWHYNMIKAPEAWAITSGSSSVKVAVLDTGIDHNHPSLANFVNTNLGRSFVGGNTMDVQGHGTHVAGTIASYGSVSGVMQSATLIPVKVLDNSGSGSLYGITQGILYAADIDADVINMSLGGGGYNQSMDEAVQTAVAQGTIVVAATGNDGASSISYPAAYSSVIAVGSVTSNRTRSSFSNYGSGLEVMAPGSNIYSTYPNSRYTSLSGTSMATPHVAGVAGLIRAANPDISVAQARQILRDTAQEAGSFTQYGYGIVDAHAAVVAASGGSGG

SEQ ID NO: 1761 - DNA, 1239 bp, synthetic construct
  misc_feature 1..1239: note = Variant of serine peptidase from Bacillus sinesaloumensis
  source 1..1239: mol_type = other DNA
atggcagatcaagctagtcaagctaatggaaaccaggacgtcattgaaggcgagctgatcgtttcagtggaaccgaagaacggtaaacctgatgtgagcattcaaagtgcacaatccgtaacagggcaggaagacgtccttaaatcgaaaggctttacgatcgttgataccttgcatgtagaggatagcagcgtcaagccactcgtctcgaagaatttcaataagaaagtggtggagaagatgggactggtgtatcttgttcaatactctccggaccagtttaaaagttccaacattgcgaagaaagaactcagaaaagaattgatggatctgggctttaaagtccgctatataagcgaaaattacaagatgatggcgatcgaaggtacagccactcttcaggcagtacaccctattcaaaactggcattataatatgattaaagctccggaagcgtgggctattacgtctggatcctctagcgttaaagtagcagtcctggatacagggatcgaccataatcacccatccttggccaacttcgtgaatactaatcttggccggtcgtttgttggaggaaacaccatggatgttcaaggtcatggcacacatgttgctggcacgattgcatcttatgggagtgtaagcggagtgatgcagagtgcgacactgatcccggtcaaagtgctcgataattctggcagcgggtccctttacggtattacgcaaggcatattgtatgccgccgacatcgatgcggacgtcattaacatgtctctgggtggaggaggctataatcagagcatggatgaggctgttcaaacagcagttgctcagggaaccattgtagtagcagcgactggcaatgatggtgcatcgtcgatcagttatcctgctgcctacagcagcgtcattgcggtgggatctgtgacgtccaatcgtacacgatcctcgttttctaactatggatctgggcttgaagttatggcaccgggcagcaacatctacagtacgtatcctaattccagatatacatctttgagtggtacaagcatggctactccgcacgttgcgggcgtagctgggctcattcgcgcagccaacccagacatatctgtcgcgcaagcccgtcagattctgcgggataccgcgcaagaagcaggatcgttcacacagtacggctatggaatcgtcgatgctcatgccgccgttgttgctgcatccggtggtagcggcggc

SEQ ID NO: 1762 - protein, 413 aa, synthetic construct
  REGION 1..413: note = Variant of serine peptidase from Bacillus sinesaloumensis
MADQASQANGNQDVIEGELIVSVEPKNGKPDVSIQSAQSVTGQEDVLKSKGFTIVDTLHVEDSSVKPLVSKNFNKKVVEKMGLVYLVQYSPDQFKSSNIAKKELRKELMDLGFKVRYISENYKMMAIEGTATLQAVHPIQNWHYNMIKAPEAWAITSGSSSVKVAVLDTGIDHNHPSLANFVNTNLGRSFVGGNTMDVQGHGTHVAGTIASYGSVSGVMQSATLIPVKVLDNSGSGSLYGITQGILYAADIDADVINMSLGGGGYNQSMDEAVQTAVAQGTIVVAATGNDGASSISYPAAYSSVIAVGSVTSNRTRSSFSNYGSGLEVMAPGSNIYSTYPNSRYTSLSGTSMATPHVAGVAGLIRAANPDISVAQARQILRDTAQEAGSFTQYGYGIVDAHAAVVAASGGSGG

SEQ ID NO: 1763 - DNA, 1239 bp, synthetic construct
  misc_feature 1..1239: note = Variant of serine peptidase from Bacillus sinesaloumensis
  source 1..1239: mol_type = other DNA
atggcagatcaagctagtcaagctaatggaaaccaggacgtcattgaaggcgagctgatcgtttcagtggaaccgaagaacggtaaacctgatgtgagcattcaaagtgcacaatccgtaacagggcaggaagacgtccttaaatcgaaaggctttacgatcgttgataccttgcatgtagaggatagcagcgtcaagccactcgtctcgaagaatttcaataagaaagtggtggagaagatgggactggtgtatcttgttcaatactctccggaccagtttaaaagttccaacattgcgaagaaagaactcagaaaagaattgatggatctgggctttaaagtccgctatataagcgaaaattacaagatgatggcgatcgaaggtacagccactcttcaggcagtacaccctagtcaaaactggcattataatatgattaaagctccggaagcgtgggctattacgtctggatcctctagcgttaaagtagcagtcctggatacagggatcgaccataatcacccatccttggccaacttcgtgaatactaatcttggccggtcgtttgttggaggaaacaccatggatgttcaaggtcatggcacacatgttgctggcacgattgcatcttatgggagtgtaagcggagtgatgcagagtgcgacactgatcccggtcaaagtgctcgataattctggcagcgggtccctttacggtattacgcaaggcatattgtatgccgccgacatcgatgcggacgtcattaacatgtctctgggtggaggaggctataatcagagcatggatgaggctgttcaaacagcagttgctcagggaaccattgtagtagcagcgactggcaatgatggtgcatcgtcgatcagttatcctgctgcctacagcagcgtcattgcggtgggatctgtgacgtccaatcgtacacgatcctcgttttctaactatggatctgggcttgaagttatggcaccgggcagcaacatctacagtacgtatcctaattccagatatacatctttgagtggtacaagcatggctactccgcacgttgcgggcgtagctgggctcattcgcgcagccaacccagacatatctgtcgcgcaagcccgtcagattctgcgggataccgcgcaagaagcaggatcgttcacacagtacggctatggaatcgtcgatgctcatgccgccgttgttgctgcatccggtggtagcggcggc

SEQ ID NO: 1764 - protein, 413 aa, synthetic construct
  REGION 1..413: note = Variant of serine peptidase from Bacillus sinesaloumensis
MADQASQANGNQDVIEGELIVSVEPKNGKPDVSIQSAQSVTGQEDVLKSKGFTIVDTLHVEDSSVKPLVSKNFNKKVVEKMGLVYLVQYSPDQFKSSNIAKKELRKELMDLGFKVRYISENYKMMAIEGTATLQAVHPSQNWHYNMIKAPEAWAITSGSSSVKVAVLDTGIDHNHPSLANFVNTNLGRSFVGGNTMDVQGHGTHVAGTIASYGSVSGVMQSATLIPVKVLDNSGSGSLYGITQGILYAADIDADVINMSLGGGGYNQSMDEAVQTAVAQGTIVVAATGNDGASSISYPAAYSSVIAVGSVTSNRTRSSFSNYGSGLEVMAPGSNIYSTYPNSRYTSLSGTSMATPHVAGVAGLIRAANPDISVAQARQILRDTAQEAGSFTQYGYGIVDAHAAVVAASGGSGG

SEQ ID NO: 1765 - DNA, 1239 bp, synthetic construct; identical to SEQ ID NO: 37
  misc_feature 1..1239: note = Variant of serine peptidase from Bacillus sinesaloumensis
  source 1..1239: mol_type = other DNA

SEQ ID NO: 1766 - protein, 413 aa, synthetic construct; identical to SEQ ID NO: 38
  REGION 1..413: note = Variant of serine peptidase from Bacillus sinesaloumensis

SEQ ID NO: 1767 - DNA, 1239 bp, synthetic construct; identical to SEQ ID NO: 565
  misc_feature 1..1239: note = Variant of serine peptidase from Bacillus sinesaloumensis
  source 1..1239: mol_type = other DNA

SEQ ID NO: 1768 - protein, 413 aa, synthetic construct; identical to SEQ ID NO: 566
  REGION 1..413: note = Variant of serine peptidase from Bacillus sinesaloumensis

SEQ ID NO: 1769 - DNA, 1239 bp, synthetic construct; identical to SEQ ID NO: 571
  misc_feature 1..1239: note = Variant of serine peptidase from Bacillus sinesaloumensis
  source 1..1239: mol_type = other DNA

SEQ ID NO: 1770 - protein, 413 aa, synthetic construct; identical to SEQ ID NO: 572
  REGION 1..413: note = Variant of serine peptidase from Bacillus sinesaloumensis

SEQ ID NO: 1771 - DNA, 1239 bp, synthetic construct
  misc_feature 1..1239: note = Variant of serine peptidase from Bacillus sinesaloumensis
  source 1..1239: mol_type = other DNA
atggcagatcaagctagtcaagctaatggaaaccaggacgtcattgaaggcgagctgatcgtttcagtggaaccgaagaacggtaaacctgatgtgagcattcaaagtgcacaatccgtaacagggcaggaagacgtccttaaatcgaaaggctttacgatcgttgataccttgcatgtagaggatagcagcgtcaagccactcgtctcgaagaatttcaataagaaagtggtggagaagatgggactggtgtatcttgttcaatactctccggaccagtttaaaagttccaacattgcgaagaaagaactcagaaaagaattgatggatctgggctttaaagtccgctatataagcgaaaattacaagatgatggcgatcgaaggtacagccactcttcaggcagtacaccctaaccaactttggcattataatatgattaaagctccggaagcgtgggctattacgtctggatcctctagcgttaaagtagcagtcctggatacagggatcgaccataatcacccatccttggccaacttcgtgaatactaatcttggccggtcgtttgttggaggaaacaccatggatgttcaaggtcatggcacacatgttgctggcacgattgcatcttatgggagtgtaagcggagtgatgcagagtgcgacactgatcccggtcaaagtgctcgataattctggcagcgggtccctttacggtattacgcaaggcatattgtatgccgccgacatcgatgcggacgtcattaacatgtctctgggtggaggaggctataatcagagcatggatgaggctgttcaaacagcagttgctcagggaaccattgtagtagcagcgactggcaatgatggtgcatcgtcgatcagttatcctgctgcctacagcagcgtcattgcggtgggatctgtgacgtccaatcgtacacgatcctcgttttctaactatggatctgggcttgaagttatggcaccgggcagcaacatctacagtacgtatcctaattccagatatacatctttgagtggtacaagcatggctactccgcacgttgcgggcgtagctgggctcattcgcgcagccaacccagacatatctgtcgcgcaagcccgtcagattctgcgggataccgcgcaagaagcaggatcgttcacacagtacggctatggaatcgtcgatgctcatgccgccgttgttgctgcatccggtggtagcggcggc

SEQ ID NO: 1772 - protein, 413 aa, synthetic construct; identical to SEQ ID NO: 492
  REGION 1..413: note = Variant of serine peptidase from Bacillus sinesaloumensis

SEQ ID NO: 1773 - DNA, 1239 bp, synthetic construct
  misc_feature 1..1239: note = Variant of serine peptidase from Bacillus sinesaloumensis
  source 1..1239: mol_type = other DNA
atggcagatcaagctagtcaagctaatggaaaccaggacgtcattgaaggcgagctgatcgtttcagtggaaccgaagaacggtaaacctgatgtgagcattcaaagtgcacaatccgtaacagggcaggaagacgtccttaaatcgaaaggctttacgatcgttgataccttgcatgtagaggatagcagcgtcaagccactcgtctcgaagaatttcaataagaaagtggtggagaagatgggactggtgtatcttgttcaatactctccggaccagtttaaaagttccaacattgcgaagaaagaactcagaaaagaattgatggatctgggctttaaagtccgctatataagcgaaaattacaagatgatggcgatcgaaggtacagccactcttcaggcagtacaccctaaccaaaggtggcattataatatgattaaagctccggaagcgtgggctattacgtctggatcctctagcgttaaagtagcagtcctggatacagggatcgaccataatcacccatccttggccaacttcgtgaatactaatcttggccggtcgtttgttggaggaaacaccatggatgttcaaggtcatggcacacatgttgctggcacgattgcatcttatgggagtgtaagcggagtgatgcagagtgcgacactgatcccggtcaaagtgctcgataattctggcagcgggtccctttacggtattacgcaaggcatattgtatgccgccgacatcgatgcggacgtcattaacatgtctctgggtggaggaggctataatcagagcatggatgaggctgttcaaacagcagttgctcagggaaccattgtagtagcagcgactggcaatgatggtgcatcgtcgatcagttatcctgctgcctacagcagcgtcattgcggtgggatctgtgacgtccaatcgtacacgatcctcgttttctaactatggatctgggcttgaagttatggcaccgggcagcaacatctacagtacgtatcctaattccagatatacatctttgagtggtacaagcatggctactccgcacgttgcgggcgtagctgggctcattcgcgcagccaacccagacatatctgtcgcgcaagcccgtcagattctgcgggataccgcgcaagaagcaggatcgttcacacagtacggctatggaatcgtcgatgctcatgccgccgttgttgctgcatccggtggtagcggcggc

SEQ ID NO: 1774 - protein, 413 aa, synthetic construct; identical to SEQ ID NO: 454
  REGION 1..413: note = Variant of serine peptidase from Bacillus sinesaloumensis

SEQ ID NO: 1775 - DNA, 1239 bp, synthetic construct; identical to SEQ ID NO: 125
  misc_feature 1..1239: note = Variant of serine peptidase from Bacillus sinesaloumensis
  source 1..1239: mol_type = other DNA

SEQ ID NO: 1776 - protein, 413 aa, synthetic construct; identical to SEQ ID NO: 126
  REGION 1..413: note = Variant of serine peptidase from Bacillus sinesaloumensis

SEQ ID NO: 1777 - DNA, 1239 bp, synthetic construct
  misc_feature 1..1239: note = Variant of serine peptidase from Bacillus sinesaloumensis
  source 1..1239: mol_type = other DNA
atggcagatcaagctagtcaagctaatggaaaccaggacgtcattgaaggcgagctgatcgtttcagtggaaccgaagaacggtaaacctgatgtgagcattcaaagtgcacaatccgtaacagggcaggaagacgtccttaaatcgaaaggctttacgatcgttgataccttgcatgtagaggatagcagcgtcaagccactcgtctcgaagaatttcaataagaaagtggtggagaagatgggactggtgtatcttgttcaatactctccggaccagtttaaaagttccaacattgcgaagaaagaactcagaaaagaattgatggatctgggctttaaagtccgctatataagcgaaaattacaagatgatggcgatcgaaggtacagccactcttcaggcagtacaccctaaccaaggttggcattataatatgattaaagctccggaagcgtgggctattacgtctggatcctctagcgttaaagtagcagtcctggatacagggatcgaccataatcacccatccttggccaacttcgtgaatactaatcttggccggtcgtttgttggaggaaacaccatggatgttcaaggtcatggcacacatgttgctggcacgattgcatcttatgggagtgtaagcggagtgatgcagagtgcgacactgatcccggtcaaagtgctcgataattctggcagcgggtccctttacggtattacgcaaggcatattgtatgccgccgacatcgatgcggacgtcattaacatgtctctgggtggaggaggctataatcagagcatggatgaggctgttcaaacagcagttgctcagggaaccattgtagtagcagcgactggcaatgatggtgcatcgtcgatcagttatcctgctgcctacagcagcgtcattgcggtgggatctgtgacgtccaatcgtacacgatcctcgttttctaactatggatctgggcttgaagttatggcaccgggcagcaacatctacagtacgtatcctaattccagatatacatctttgagtggtacaagcatggctactccgcacgttgcgggcgtagctgggctcattcgcgcagccaacccagacatatctgtcgcgcaagcccgtcagattctgcgggataccgcgcaagaagcaggatcgttcacacagtacggctatggaatcgtcgatgctcatgccgccgttgttgctgcatccggtggtagcggcggc

SEQ ID NO: 1778 - protein, 413 aa, synthetic construct
  REGION 1..413: note = Variant of serine peptidase from Bacillus sinesaloumensis
MADQASQANGNQDVIEGELIVSVEPKNGKPDVSIQSAQSVTGQEDVLKSKGFTIVDTLHVEDSSVKPLVSKNFNKKVVEKMGLVYLVQYSPDQFKSSNIAKKELRKELMDLGFKVRYISENYKMMAIEGTATLQAVHPNQGWHYNMIKAPEAWAITSGSSSVKVAVLDTGIDHNHPSLANFVNTNLGRSFVGGNTMDVQGHGTHVAGTIASYGSVSGVMQSATLIPVKVLDNSGSGSLYGITQGILYAADIDADVINMSLGGGGYNQSMDEAVQTAVAQGTIVVAATGNDGASSISYPAAYSSVIAVGSVTSNRTRSSFSNYGSGLEVMAPGSNIYSTYPNSRYTSLSGTSMATPHVAGVAGLIRAANPDISVAQARQILRDTAQEAGSFTQYGYGIVDAHAAVVAASGGSGG

SEQ ID NO: 1779 - DNA, 1239 bp, synthetic construct
  misc_feature 1..1239: note = Variant of serine peptidase from Bacillus sinesaloumensis
  source 1..1239: mol_type = other DNA
atggcagatcaagctagtcaagctaatggaaaccaggacgtcattgaaggcgagctgatcgtttcagtggaaccgaagaacggtaaacctgatgtgagcattcaaagtgcacaatccgtaacagggcaggaagacgtccttaaatcgaaaggctttacgatcgttgataccttgcatgtagaggatagcagcgtcaagccactcgtctcgaagaatttcaataagaaagtggtggagaagatgggactggtgtatcttgttcaatactctccggaccagtttaaaagttccaacattgcgaagaaagaactcagaaaagaattgatggatctgggctttaaagtccgctatataagcgaaaattacaagatgatggcgatcgaaggtacagccactcttcaggcagtacaccctaaccaatattggcattataatatgattaaagctccggaagcgtgggctattacgtctggatcctctagcgttaaagtagcagtcctggatacagggatcgaccataatcacccatccttggccaacttcgtgaatactaatcttggccggtcgtttgttggaggaaacaccatggatgttcaaggtcatggcacacatgttgctggcacgattgcatcttatgggagtgtaagcggagtgatgcagagtgcgacactgatcccggtcaaagtgctcgataattctggcagcgggtccctttacggtattacgcaaggcatattgtatgccgccgacatcgatgcggacgtcattaacatgtctctgggtggaggaggctataatcagagcatggatgaggctgttcaaacagcagttgctcagggaaccattgtagtagcagcgactggcaatgatggtgcatcgtcgatcagttatcctgctgcctacagcagcgtcattgcggtgggatctgtgacgtccaatcgtacacgatcctcgttttctaactatggatctgggcttgaagttatggcaccgggcagcaacatctacagtacgtatcctaattccagatatacatctttgagtggtacaagcatggctactccgcacgttgcgggcgtagctgggctcattcgcgcagccaacccagacatatctgtcgcgcaagcccgtcagattctgcgggataccgcgcaagaagcaggatcgttcacacagtacggctatggaatcgtcgatgctcatgccgccgttgttgctgcatccggtggtagcggcggc

SEQ ID NO: 1780 - protein, 413 aa, synthetic construct
  REGION 1..413: note = Variant of serine peptidase from Bacillus sinesaloumensis
MADQASQANGNQDVIEGELIVSVEPKNGKPDVSIQSAQSVTGQEDVLKSKGFTIVDTLHVEDSSVKPLVSKNFNKKVVEKMGLVYLVQYSPDQFKSSNIAKKELRKELMDLGFKVRYISENYKMMAIEGTATLQAVHPNQYWHYNMIKAPEAWAITSGSSSVKVAVLDTGIDHNHPSLANFVNTNLGRSFVGGNTMDVQGHGTHVAGTIASYGSVSGVMQSATLIPVKVLDNSGSGSLYGITQGILYAADIDADVINMSLGGGGYNQSMDEAVQTAVAQGTIVVAATGNDGASSISYPAAYSSVIAVGSVTSNRTRSSFSNYGSGLEVMAPGSNIYSTYPNSRYTSLSGTSMATPHVAGVAGLIRAANPDISVAQARQILRDTAQEAGSFTQYGYGIVDAHAAVVAASGGSGG

SEQ ID NO: 1781 - DNA, 1239 bp, synthetic construct
  misc_feature 1..1239: note = Variant of serine peptidase from Bacillus sinesaloumensis
  source 1..1239: mol_type = other DNA
atggcagatcaagctagtcaagctaatggaaaccaggacgtcattgaaggcgagctgatcgtttcagtggaaccgaagaacggtaaacctgatgtgagcattcaaagtgcacaatccgtaacagggcaggaagacgtccttaaatcgaaaggctttacgatcgttgataccttgcatgtagaggatagcagcgtcaagccactcgtctcgaagaatttcaataagaaagtggtggagaagatgggactggtgtatcttgttcaatactctccggaccagtttaaaagttccaacattgcgaagaaagaactcagaaaagaattgatggatctgggctttaaagtccgctatataagcgaaaattacaagatgatggcgatcgaaggtacagccactcttcaggcagtacaccctaaccaaatttggcattataatatgattaaagctccggaagcgtgggctattacgtctggatcctctagcgttaaagtagcagtcctggatacagggatcgaccataatcacccatccttggccaacttcgtgaatactaatcttggccggtcgtttgttggaggaaacaccatggatgttcaaggtcatggcacacatgttgctggcacgattgcatcttatgggagtgtaagcggagtgatgcagagtgcgacactgatcccggtcaaagtgctcgataattctggcagcgggtccctttacggtattacgcaaggcatattgtatgccgccgacatcgatgcggacgtcattaacatgtctctgggtggaggaggctataatcagagcatggatgaggctgttcaaacagcagttgctcagggaaccattgtagtagcagcgactggcaatgatggtgcatcgtcgatcagttatcctgctgcctacagcagcgtcattgcggtgggatctgtgacgtccaatcgtacacgatcctcgttttctaactatggatctgggcttgaagttatggcaccgggcagcaacatctacagtacgtatcctaattccagatatacatctttgagtggtacaagcatggctactccgcacgttgcgggcgtagctgggctcattcgcgcagccaacccagacatatctgtcgcgcaagcccgtcagattctgcgggataccgcgcaagaagcaggatcgttcacacagtacggctatggaatcgtcgatgctcatgccgccgttgttgctgcatccggtggtagcggcggc

SEQ ID NO: 1782 - protein, 413 aa, synthetic construct
  REGION 1..413: note = Variant of serine peptidase from Bacillus sinesaloumensis
MADQASQANGNQDVIEGELIVSVEPKNGKPDVSIQSAQSVTGQEDVLKSKGFTIVDTLHVEDSSVKPLVSKNFNKKVVEKMGLVYLVQYSPDQFKSSNIAKKELRKELMDLGFKVRYISENYKMMAIEGTATLQAVHPNQIWHYNMIKAPEAWAITSGSSSVKVAVLDTGIDHNHPSLANFVNTNLGRSFVGGNTMDVQGHGTHVAGTIASYGSVSGVMQSATLIPVKVLDNSGSGSLYGITQGILYAADIDADVINMSLGGGGYNQSMDEAVQTAVAQGTIVVAATGNDGASSISYPAAYSSVIAVGSVTSNRTRSSFSNYGSGLEVMAPGSNIYSTYPNSRYTSLSGTSMATPHVAGVAGLIRAANPDISVAQARQILRDTAQEAGSFTQYGYGIVDAHAAVVAASGGSGG

SEQ ID NO: 1783 - DNA, 1239 bp, synthetic construct
  misc_feature 1..1239: note = Variant of serine peptidase from Bacillus sinesaloumensis
  source 1..1239: mol_type = other DNA
atggcagatcaagctagtcaagctaatggaaaccaggacgtcattgaaggcgagctgatcgtttcagtggaaccgaagaacggtaaacctgatgtgagcattcaaagtgcacaatccgtaacagggcaggaagacgtccttaaatcgaaaggctttacgatcgttgataccttgcatgtagaggatagcagcgtcaagccactcgtctcgaagaatttcaataagaaagtggtggagaagatgggactggtgtatcttgttcaatactctccggaccagtttaaaagttccaacattgcgaagaaagaactcagaaaagaattgatggatctgggctttaaagtccgctatataagcgaaaattacaagatgatggcgatcgaaggtacagccactcttcaggcagtacaccctaaccaatgctggcattataatatgattaaagctccggaagcgtgggctattacgtctggatcctctagcgttaaagtagcagtcctggatacagggatcgaccataatcacccatccttggccaacttcgtgaatactaatcttggccggtcgtttgttggaggaaacaccatggatgttcaaggtcatggcacacatgttgctggcacgattgcatcttatgggagtgtaagcggagtgatgcagagtgcgacactgatcccggtcaaagtgctcgataattctggcagcgggtccctttacggtattacgcaaggcatattgtatgccgccgacatcgatgcggacgtcattaacatgtctctgggtggaggaggctataatcagagcatggatgaggctgttcaaacagcagttgctcagggaaccattgtagtagcagcgactggcaatgatggtgcatcgtcgatcagttatcctgctgcctacagcagcgtcattgcggtgggatctgtgacgtccaatcgtacacgatcctcgttttctaactatggatctgggcttgaagttatggcaccgggcagcaacatctacagtacgtatcctaattccagatatacatctttgagtggtacaagcatggctactccgcacgttgcgggcgtagctgggctcattcgcgcagccaacccagacatatctgtcgcgcaagcccgtcagattctgcgggataccgcgcaagaagcaggatcgttcacacagtacggctatggaatcgtcgatgctcatgccgccgttgttgctgcatccggtggtagcggcggc

SEQ ID NO: 1784 - protein, 413 aa, synthetic construct
  REGION 1..413: note = Variant of serine peptidase from Bacillus sinesaloumensis
MADQASQANGNQDVIEGELIVSVEPKNGKPDVSIQSAQSVTGQEDVLKSKGFTIVDTLHVEDSSVKPLVSKNFNKKVVEKMGLVYLVQYSPDQFKSSNIAKKELRKELMDLGFKVRYISENYKMMAIEGTATLQAVHPNQCWHYNMIKAPEAWAITSGSSSVKVAVLDTGIDHNHPSLANFVNTNLGRSFVGGNTMDVQGHGTHVAGTIASYGSVSGVMQSATLIPVKVLDNSGSGSLYGITQGILYAADIDADVINMSLGGGGYNQSMDEAVQTAVAQGTIVVAATGNDGASSISYPAAYSSVIAVGSVTSNRTRSSFSNYGSGLEVMAPGSNIYSTYPNSRYTSLSGTSMATPHVAGVAGLIRAANPDISVAQARQILRDTAQEAGSFTQYGYGIVDAHAAVVAASGGSGG

SEQ ID NO: 1785 - DNA, 1239 bp, synthetic construct
  misc_feature 1..1239: note = Variant of serine peptidase from Bacillus sinesaloumensis
  source 1..1239: mol_type = other DNA
atggcagatcaagctagtcaagctaatggaaaccaggacgtcattgaaggcgagctgatcgtttcagtggaaccgaagaacggtaaacctgatgtgagcattcaaagtgcacaatccgtaacagggcaggaagacgtccttaaatcgaaaggctttacgatcgttgataccttgcatgtagaggatagcagcgtcaagccactcgtctcgaagaatttcaataagaaagtggtggagaagatgggactggtgtatcttgttcaatactctccggaccagtttaaaagttccaacattgcgaagaaagaactcagaaaagaattgatggatctgggctttaaagtccgctatataagcgaaaattacaagatgatggcgatcgaaggtacagccactcttcaggcagtacaccctaaccaattctggcattataatatgattaaagctccggaagcgtgggctattacgtctggatcctctagcgttaaagtagcagtcctggatacagggatcgaccataatcacccatccttggccaacttcgtgaatactaatcttggccggtcgtttgttggaggaaacaccatggatgttcaaggtcatggcacacatgttgctggcacgattgcatcttatgggagtgtaagcggagtgatgcagagtgcgacactgatcccggtcaaagtgctcgataattctggcagcgggtccctttacggtattacgcaaggcatattgtatgccgccgacatcgatgcggacgtcattaacatgtctctgggtggaggaggctataatcagagcatggatgaggctgttcaaacagcagttgctcagggaaccattgtagtagcagcgactggcaatgatggtgcatcgtcgatcagttatcctgctgcctacagcagcgtcattgcggtgggatctgtgacgtccaatcgtacacgatcctcgttttctaactatggatctgggcttgaagttatggcaccgggcagcaacatctacagtacgtatcctaattccagatatacatctttgagtggtacaagcatggctactccgcacgttgcgggcgtagctgggctcattcgcgcagccaacccagacatatctgtcgcgcaagcccgtcagattctgcgggataccgcgcaagaagcaggatcgttcacacagtacggctatggaatcgtcgatgctcatgccgccgttgttgctgcatccggtggtagcggcggc

SEQ ID NO: 1786 - protein, 413 aa, synthetic construct
  REGION 1..413: note = Variant of serine peptidase from Bacillus sinesaloumensis
MADQASQANGNQDVIEGELIVSVEPKNGKPDVSIQSAQSVTGQEDVLKSKGFTIVDTLHVEDSSVKPLVSKNFNKKVVEKMGLVYLVQYSPDQFKSSNIAKKELRKELMDLGFKVRYISENYKMMAIEGTATLQAVHPNQFWHYNMIKAPEAWAITSGSSSVKVAVLDTGIDHNHPSLANFVNTNLGRSFVGGNTMDVQGHGTHVAGTIASYGSVSGVMQSATLIPVKVLDNSGSGSLYGITQGILYAADIDADVINMSLGGGGYNQSMDEAVQTAVAQGTIVVAATGNDGASSISYPAAYSSVIAVGSVTSNRTRSSFSNYGSGLEVMAPGSNIYSTYPNSRYTSLSGTSMATPHVAGVAGLIRAANPDISVAQARQILRDTAQEAGSFTQYGYGIVDAHAAVVAASGGSGG

SEQ ID NO: 1787 - DNA, 1239 bp, synthetic construct; identical to SEQ ID NO: 573
  misc_feature 1..1239: note = Variant of serine peptidase from Bacillus sinesaloumensis
  source 1..1239: mol_type = other DNA

SEQ ID NO: 1788 - protein, 413 aa, synthetic construct; identical to SEQ ID NO: 574
  REGION 1..413: note = Variant of serine peptidase from Bacillus sinesaloumensis

SEQ ID NO: 1789 - DNA, 1239 bp, synthetic construct
  misc_feature 1..1239: note = Variant of serine peptidase from Bacillus sinesaloumensis
  source 1..1239: mol_type = other DNA
atggcagatcaagctagtcaagctaatggaaaccaggacgtcattgaaggcgagctgatcgtttcagtggaaccgaagaacggtaaacctgatgtgagcattcaaagtgcacaatccgtaacagggcaggaagacgtccttaaatcgaaaggctttacgatcgttgataccttgcatgtagaggatagcagcgtcaagccactcgtctcgaagaatttcaataagaaagtggtggagaagatgggactggtgtatcttgttcaatactctccggaccagtttaaaagttccaacattgcgaagaaagaactcagaaaagaattgatggatctgggctttaaagtccgctatataagcgaaaattacaagatgatggcgatcgaaggtacagccactcttcaggcagtacaccctaaccaagattggcattataatatgattaaagctccggaagcgtgggctattacgtctggatcctctagcgttaaagtagcagtcctggatacagggatcgaccataatcacccatccttggccaacttcgtgaatactaatcttggccggtcgtttgttggaggaaacaccatggatgttcaaggtcatggcacacatgttgctggcacgattgcatcttatgggagtgtaagcggagtgatgcagagtgcgacactgatcccggtcaaagtgctcgataattctggcagcgggtccctttacggtattacgcaaggcatattgtatgcagccgacatcgatgcggacgtcattaacatgtctctgggtggaggaggctataatcagagcatggatgaggctgttcaaacagcagttgctcagggaaccattgtagtagcagcgactggcaatgatggtgcatcgtcgatcagttatcctgctgcctacagcagcgtcattgcggtgggatctgtgacgtccaatcgtacacgatcctcgttttctaactatggatctgggcttgaagttatggcaccgggcagcaacatctacagtacgtatcctaattccagatatacatctttgagtggtacaagcatggctactccgcacgttgcgggcgtagctgggctcattcgcgcagccaacccagacatatctgtcgcgcaagcccgtcagattctgcgggataccgcgcaagaagcaggatcgttcacacagtacggctatggaatcgtcgatgctcatgccgccgttgttgctgcatccggtggtagcggcggc

SEQ ID NO: 1790 - protein, 413 aa, synthetic construct; identical to SEQ ID NO: 238
  REGION 1..413: note = Variant of serine peptidase from Bacillus sinesaloumensis

SEQ ID NO: 1791 - DNA, 1239 bp, synthetic construct
  misc_feature 1..1239: note = Variant of serine peptidase from Bacillus sinesaloumensis
  source 1..1239: mol_type = other DNA
atggcagatcaagctagtcaagctaatggaaaccaggacgtcattgaaggcgagctgatcgtttcagtggaaccgaagaacggtaaacctgatgtgagcattcaaagtgcacaatccgtaacagggcaggaagacgtccttaaatcgaaaggctttacgatcgttgataccttgcatgtagaggatagcagcgtcaagccactcgtctcgaagaatttcaataagaaagtggtggagaagatgggactggtgtatcttgttcaatactctccggaccagtttaaaagttccaacattgcgaagaaagaactcagaaaagaattgatggatctgggctttaaagtccgctatataagcgaaaattacaagatgatggcgatcgaaggtacagccactcttcaggcagtacaccctaaccaagaatggcattataatatgattaaagctccggaagcgtgggctattacgtctggatcctctagcgttaaagtagcagtcctggatacagggatcgaccataatcacccatccttggccaacttcgtgaatactaatcttggccggtcgtttgttggaggaaacaccatggatgttcaaggtcatggcacacatgttgctggcacgattgcatcttatgggagtgtaagcggagtgatgcagagtgcgacactgatcccggtcaaagtgctcgataattctggcagcgggtccctttacggtattacgcaaggcatattgtatgccgccgacatcgatgcggacgtcattaacatgtctctgggtggaggaggctataatcagagcatggatgaggctgttcaaacagcagttgctcagggaaccattgtagtagcagcgactggcaatgatggtgcatcgtcgatcagttatcctgctgcctacagcagcgtcattgcggtgggatctgtgacgtccaatcgtacacgatcctcgttttctaactatggatctgggcttgaagttatggcaccgggcagcaacatctacagtacgtatcctaattccagatatacatctttgagtggtacaagcatggctactccgcacgttgcgggcgtagctgggctcattcgcgcagccaacccagacatatctgtcgcgcaagcccgtcagattctgcgggataccgcgcaagaagcaggatcgttcacacagtacggctatggaatcgtcgatgctcatgccgccgttgttgctgcatccggtggtagcggcggc

SEQ ID NO: 1792 - protein, 413 aa, synthetic construct
  REGION 1..413: note = Variant of serine peptidase from Bacillus sinesaloumensis
MADQASQANGNQDVIEGELIVSVEPKNGKPDVSIQSAQSVTGQEDVLKSKGFTIVDTLHVEDSSVKPLVSKNFNKKVVEKMGLVYLVQYSPDQFKSSNIAKKELRKELMDLGFKVRYISENYKMMAIEGTATLQAVHPNQEWHYNMIKAPEAWAITSGSSSVKVAVLDTGIDHNHPSLANFVNTNLGRSFVGGNTMDVQGHGTHVAGTIASYGSVSGVMQSATLIPVKVLDNSGSGSLYGITQGILYAADIDADVINMSLGGGGYNQSMDEAVQTAVAQGTIVVAATGNDGASSISYPAAYSSVIAVGSVTSNRTRSSFSNYGSGLEVMAPGSNIYSTYPNSRYTSLSGTSMATPHVAGVAGLIRAANPDISVAQARQILRDTAQEAGSFTQYGYGIVDAHAAVVAASGGSGG

SEQ ID NO: 1793 - DNA, 1239 bp, synthetic construct
  misc_feature 1..1239: note = Variant of serine peptidase from Bacillus sinesaloumensis
  source 1..1239: mol_type = other DNA
atggcagatcaagctagtcaagctaatggaaaccaggacgtcattgaaggcgagctgatcgtttcagtggaaccgaagaacggtaaacctgatgtgagcattcaaagtgcacaatccgtaacagggcaggaagacgtccttaaatcgaaaggctttacgatcgttgataccttgcatgtagaggatagcagcgtcaagccactcgtctcgaagaatttcaataagaaagtggtggagaagatgggactggtgtatcttgttcaatactctccggaccagtttaaaagttccaacattgcgaagaaagaactcagaaaagaattgatggatctgggctttaaagtccgctatataagcgaaaattacaagatgatggcgatcgaaggtacagccactcttcaggcagtacaccctaaccaacattggcattataatatgattaaagctccggaagcgtgggctattacgtctggatcctctagcgttaaagtagcagtcctggatacagggatcgaccataatcacccatccttggccaacttcgtgaatactaatcttggccggtcgtttgttggaggaaacaccatggatgttcaaggtcatggcacacatgttgctggcacgattgcatcttatgggagtgtaagcggagtgatgcagagtgcgacactgatcccggtcaaagtgctcgataattctggcagcgggtccctttacggtattacgcaaggcatattgtatgccgccgacatcgatgcggacgtcattaacatgtctctgggtggaggaggctataatcagagcatggatgaggctgttcaaacagcagttgctcagggaaccattgtagtagcagcgactggcaatgatggtgcatcgtcgatcagttatcctgctgcctacagcagcgtcattgcggtgggatctgtgacgtccaatcgtacacgatcctcgttttctaactatggatctgggcttgaagttatggcaccgggcagcaacatctacagtacgtatcctaattccagatatacatctttgagtggtacaagcatggctactccgcacgttgcgggcgtagctgggctcattcgcgcagccaacccagacatatctgtcgcgcaagcccgtcagattctgcgggataccgcgcaagaagcaggatcgttcacacagtacggctatggaatcgtcgatgctcatgccgccgttgttgctgcatccggtggtagcggcggc

SEQ ID NO: 1794 - protein, 413 aa, synthetic construct
  REGION 1..413: note = Variant of serine peptidase from Bacillus sinesaloumensis
MADQASQANGNQDVIEGELIVSVEPKNGKPDVSIQSAQSVTGQEDVLKSKGFTIVDTLHVEDSSVKPLVSKNFNKKVVEKMGLVYLVQYSPDQFKSSNIAKKELRKELMDLGFKVRYISENYKMMAIEGTATLQAVHPNQHWHYNMIKAPEAWAITSGSSSVKVAVLDTGIDHNHPSLANFVNTNLGRSFVGGNTMDVQGHGTHVAGTIASYGSVSGVMQSATLIPVKVLDNSGSGSLYGITQGILYAADIDADVINMSLGGGGYNQSMDEAVQTAVAQGTIVVAATGNDGASSISYPAAYSSVIAVGSVTSNRTRSSFSNYGSGLEVMAPGSNIYSTYPNSRYTSLSGTSMATPHVAGVAGLIRAANPDISVAQARQILRDTAQEAGSFTQYGYGIVDAHAAVVAASGGSGG

SEQ ID NO: 1795 - DNA, 1239 bp, synthetic construct
  misc_feature 1..1239: note = Variant of serine peptidase from Bacillus sinesaloumensis
  source 1..1239: mol_type = other DNA
atggcagatcaagctagtcaagctaatggaaaccaggacgtcattgaaggcgagctgatcgtttcagtggaaccgaagaacggtaaacctgatgtgagcattcaaagtgcacaatccgtaacagggcaggaagacgtccttaaatcgaaaggctttacgatcgttgataccttgcatgtagaggatagcagcgtcaagccactcgtctcgaagaatttcaataagaaagtggtggagaagatgggactggtgtatcttgttcaatactctccggaccagtttaaaagttccaacattgcgaagaaagaactcagaaaagaattgatggatctgggctttaaagtccgctatataagcgaaaattacaagatgatggcgatcgaaggtacagccactcttcaggcagtacaccctaaccaaaactggacgtataatatgattaaagctccggaagcgtgggctattacgtctggatcctctagcgttaaagtagcagtcctggatacagggatcgaccataatcacccatccttggccaacttcgtgaatactaatcttggccggtcgtttgttggaggaaacaccatggatgttcaaggtcatggcacacatgttgctggcacgattgcatcttatgggagtgtaagcggagtgatgcagagtgcgacactgatcccggtcaaagtgctcgataattctggcagcgggtccctttacggtattacgcaaggcatattgtatgccgccgacatcgatgcggacgtcattaacatgtctctgggtggaggaggctataatcagagcatggatgaggctgttcaaacagcagttgctcagggaaccattgtagtagcagcgactggcaatgatggtgcatcgtcgatcagttatcctgctgcctacagcagcgtcattgcggtgggatctgtgacgtccaatcgtacacgatcctcgttttctaactatggatctgggcttgaagttatggcaccgggcagcaacatctacagtacgtatcctaattccagatatacatctttgagtggtacaagcatggctactccgcacgttgcgggcgtagctgggctcattcgcgcagccaacccagacatatctgtcgcgcaagcccgtcagattctgcgggataccgcgcaagaagcaggatcgttcacacagtacggctatggaatcgtcgatgctcatgccgccgttgttgctgcatccggtggtagcggcggc

SEQ ID NO: 1796 - protein, 413 aa, synthetic construct
  REGION 1..413: note = Variant of serine peptidase from Bacillus sinesaloumensis
MADQASQANGNQDVIEGELIVSVEPKNGKPDVSIQSAQSVTGQEDVLKSKGFTIVDTLHVEDSSVKPLVSKNFNKKVVEKMGLVYLVQYSPDQFKSSNIAKKELRKELMDLGFKVRYISENYKMMAIEGTATLQAVHPNQNWTYNMIKAPEAWAITSGSSSVKVAVLDTGIDHNHPSLANFVNTNLGRSFVGGNTMDVQGHGTHVAGTIASYGSVSGVMQSATLIPVKVLDNSGSGSLYGITQGILYAADIDADVINMSLGGGGYNQSMDEAVQTAVAQGTIVVAATGNDGASSISYPAAYSSVIAVGSVTSNRTRSSFSNYGSGLEVMAPGSNIYSTYPNSRYTSLSGTSMATPHVAGVAGLIRAANPDISVAQARQILRDTAQEAGSFTQYGYGIVDAHAAVVAASGGSGG

SEQ ID NO: 1797 - DNA, 1239 bp, synthetic construct
  misc_feature 1..1239: note = Variant of serine peptidase from Bacillus sinesaloumensis
  source 1..1239: mol_type = other DNA
atggcagatcaagctagtcaagctaatggaaaccaggacgtcattgaaggcgagctgatcgtttcagtggaaccgaagaacggtaaacctgatgtgagcattcaaagtgcacaatccgtaacagggcaggaagacgtccttaaatcgaaaggctttacgatcgttgataccttgcatgtagaggatagcagcgtcaagccactcgtctcgaagaatttcaataagaaagtggtggagaagatgggactggtgtatcttgttcaatactctccggaccagtttaaaagttccaacattgcgaagaaagaactcagaaaagaattgatggatctgggctttaaagtccgctatataagcgaaaattacaagatgatggcgatcgaaggtacagccactcttcaggcagtacaccctaaccaaaactggtgttataatatgattaaagctccggaagcgtgggctattacgtctggatcctctagcgttaaagtagcagtcctggatacagggatcgaccataatcacccatccttggccaacttcgtgaatactaatcttggccggtcgtttgttggaggaaacaccatggatgttcaaggtcatggcacacatgttgctggcacgattgcatcttatgggagtgtaagcggagtgatgcagagtgcgacactgatcccggtcaaagtgctcgataattctggcagcgggtccctttacggtattacgcaaggcatattgtatgccgccgacatcgatgcggacgtcattaacatgtctctgggtggaggaggctataatcagagcatggatgaggctgttcaaacagcagttgctcagggaaccattgtagtagcagcgactggcaatgatggtgcatcgtcgatcagttatcctgctgcctacagcagcgtcattgcggtgggatctgtgacgtccaatcgtacacgatcctcgttttctaactatggatctgggcttgaagttatggcaccgggcagcaacatctacagtacgtatcctaattccagatatacatctttgagtggtacaagcatggctactccgcacgttgcgggcgtagctgggctcattcgcgcagccaacccagacatatctgtcgcgcaagcccgtcagattctgcgggataccgcgcaagaagcaggatcgttcacacagtacggctatggaatcgtcgatgctcatgccgccgttgttgctgcatccggtggtagcggcggc

SEQ ID NO: 1798 - protein, 413 aa, synthetic construct
  REGION 1..413: note = Variant of serine peptidase from Bacillus sinesaloumensis
MADQASQANGNQDVIEGELIVSVEPKNGKPDVSIQSAQSVTGQEDVLKSKGFTIVDTLHVEDSSVKPLVSKNFNKKVVEKMGLVYLVQYSPDQFKSSNIAKKELRKELMDLGFKVRYISENYKMMAIEGTATLQAVHPNQNWCYNMIKAPEAWAITSGSSSVKVAVLDTGIDHNHPSLANFVNTNLGRSFVGGNTMDVQGHGTHVAGTIASYGSVSGVMQSATLIPVKVLDNSGSGSLYGITQGILYAADIDADVINMSLGGGGYNQSMDEAVQTAVAQGTIVVAATGNDGASSISYPAAYSSVIAVGSVTSNRTRSSFSNYGSGLEVMAPGSNIYSTYPNSRYTSLSGTSMATPHVAGVAGLIRAANPDISVAQARQILRDTAQEAGSFTQYGYGIVDAHAAVVAASGGSGG

SEQ ID NO: 1799 - DNA, 1239 bp, synthetic construct
  misc_feature 1..1239: note = Variant of serine peptidase from Bacillus sinesaloumensis
  source 1..1239: mol_type = other DNA
atggcagatcaagctagtcaagctaatggaaaccaggacgtcattgaaggcgagctgatcgtttcagtggaaccgaagaacggtaaacctgatgtgagcattcaaagtgcacaatccgtaacagggcaggaagacgtccttaaatcgaaaggctttacgatcgttgataccttgcatgtagaggatagcagcgtcaagccactcgtctcgaagaatttcaataagaaagtggtggagaagatgggactggtgtatcttgttcaatactctccggaccagtttaaaagttccaacattgcgaagaaagaactcagaaaagaattgatggatctgggctttaaagtccgctatataagcgaaaattacaagatgatggcgatcgaaggtacagccactcttcaggcagtacaccctaaccaaaactggcagtataatatgattaaagctccggaagcgtgggctattacgtctggatcctctagcgttaaagtagcagtcctggatacagggatcgaccataatcacccatccttggccaacttcgtgaatactaatcttggccggtcgtttgttggaggaaacaccatggatgttcaaggtcatggcacacatgttgctggcacgattgcatcttatgggagtgtaagcggagtgatgcagagtgcgacactgatcccggtcaaagtgctcgataattctggcagcgggtccctttacggtattacgcaaggcatattgtatgccgccgacatcgatgcggacgtcattaacatgtctctgggtggaggaggctataatcagagcatggatgaggctgttcaaacagcagttgctcagggaaccattgtagtagcagcgactggcaatgatggtgcatcgtcgatcagttatcctgctgcctacagcagcgtcattgcggtgggatctgtgacgtccaatcgtacacgatcctcgttttctaactatggatctgggcttgaagttatggcaccgggcagcaacatctacagtacgtatcctaattccagatatacatctttgagtggtacaagcatggctactccgcacgttgcgggcgtagctgggctcattcgcgcagccaacccagacatatctgtcgcgcaagcccgtcagattctgcgggataccgcgcaagaagcaggatcgttcacacagtacggctatggaatcgtcgatgctcatgccgccgttgttgctgcatccggtggtagcggcggc

SEQ ID NO: 1800 - protein, 413 aa, synthetic construct
  REGION 1..413: note = Variant of serine peptidase from Bacillus sinesaloumensis
MADQASQANGNQDVIEGELIVSVEPKNGKPDVSIQSAQSVTGQEDVLKSKGFTIVDTLHVEDSSVKPLVSKNFNKKVVEKMGLVYLVQYSPDQFKSSNIAKKELRKELMDLGFKVRYISENYKMMAIEGTATLQAVHPNQNWQYNMIKAPEAWAITSGSSSVKVAVLDTGIDHNHPSLANFVNTNLGRSFVGGNTMDVQGHGTHVAGTIASYGSVSGVMQSATLIPVKVLDNSGSGSLYGITQGILYAADIDADVINMSLGGGGYNQSMDEAVQTAVAQGTIVVAATGNDGASSISYPAAYSSVIAVGSVTSNRTRSSFSNYGSGLEVMAPGSNIYSTYPNSRYTSLSGTSMATPHVAGVAGLIRAANPDISVAQARQILRDTAQEAGSFTQYGYGIVDAHAAVVAASGGSGG

SEQ ID NO: 1801 - DNA, 1239 bp, synthetic construct; identical to SEQ ID NO: 859
  misc_feature 1..1239: note = Variant of serine peptidase from Bacillus sinesaloumensis
  source 1..1239: mol_type = other DNA

SEQ ID NO: 1802 - protein, 413 aa, synthetic construct; identical to SEQ ID NO: 860
  REGION 1..413: note = Variant of serine peptidase from Bacillus sinesaloumensis

SEQ ID NO: 1803 - DNA, 1239 bp, synthetic construct
  misc_feature 1..1239: note = Variant of serine peptidase from Bacillus sinesaloumensis
  source 1..1239: mol_type = other DNA
atggcagatcaagctagtcaagctaatggaaaccaggacgtcattgaaggcgagctgatcgtttcagtggaaccgaagaacggtaaacctgatgtgagcattcaaagtgcacaatccgtaacagggcaggaagacgtccttaaatcgaaaggctttacgatcgttgataccttgcatgtagaggatagcagcgtcaagccactcgtctcgaagaatttcaataagaaagtggtggagaagatgggactggtgtatcttgttcaatactctccggaccagtttaaaagttccaacattgcgaagaaagaactcagaaaagaattgatggatctgggctttaaagtccgctatataagcgaaaattacaagatgatggcgatcgaaggtacagccactcttcaggcagtacaccctaaccaaaactgggactataatatgattaaagctccggaagcgtgggctattacgtctggatcctctagcgttaaagtagcagtcctggatacagggatcgaccataatcacccatccttggccaacttcgtgaatactaatcttggccggtcgtttgttggaggaaacaccatggatgttcaaggtcatggcacacatgttgctggcacgattgcatcttatgggagtgtaagcggagtgatgcagagtgcgacactgatcccggtcaaagtgctcgataattctggcagcgggtccctttacggtattacgcaaggcatattgtatgccgccgacatcgatgcggacgtcattaacatgtctctgggtggaggaggctataatcagagcatggatgaggctgttcaaacagcagttgctcagggaaccattgtagtagcagcgactggcaatgatggtgcatcgtcgatcagttatcctgctgcctacagcagcgtcattgcggtgggatctgtgacgtccaatcgtacacgatcctcgttttctaactatggatctgggcttgaagttatggcaccgggcagcaacatctacagtacgtatcctaattccagatatacatctttgagtggtacaagcatggctactccgcacgttgcgggcgtagctgggctcattcgcgcagccaacccagacatatctgtcgcgcaagcccgtcagattctgcgggataccgcgcaagaagcaggatcgttcacacagtacggctatggaatcgtcgatgctcatgccgccgttgttgctgcatccggtggtagcggcggc

SEQ ID NO: 1804 - protein, 413 aa, synthetic construct
  REGION 1..413: note = Variant of serine peptidase from Bacillus sinesaloumensis
MADQASQANGNQDVIEGELIVSVEPKNGKPDVSIQSAQSVTGQEDVLKSKGFTIVDTLHVEDSSVKPLVSKNFNKKVVEKMGLVYLVQYSPDQFKSSNIAKKELRKELMDLGFKVRYISENYKMMAIEGTATLQAVHPNQNWDYNMIKAPEAWAITSGSSSVKVAVLDTGIDHNHPSLANFVNTNLGRSFVGGNTMDVQGHGTHVAGTIASYGSVSGVMQSATLIPVKVLDNSGSGSLYGITQGILYAADIDADVINMSLGGGGYNQSMDEAVQTAVAQGTIVVAATGNDGASSISYPAAYSSVIAVGSVTSNRTRSSFSNYGSGLEVMAPGSNIYSTYPNSRYTSLSGTSMATPHVAGVAGLIRAANPDISVAQARQILRDTAQEAGSFTQYGYGIVDAHAAVVAASGGSGG

SEQ ID NO: 1805 - DNA, 1239 bp, synthetic construct
  misc_feature 1..1239: note = Variant of serine peptidase from Bacillus sinesaloumensis
  source 1..1239: mol_type = other DNA
atggcagatcaagctagtcaagctaatggaaaccaggacgtcattgaaggcgagctgatcgtttcagtggaaccgaagaacggtaaacctgatgtgagcattcaaagtgcacaatccgtaacagggcaggaagacgtccttaaatcgaaaggctttacgatcgttgataccttgcatgtagaggatagcagcgtcaagccactcgtctcgaagaatttcaataagaaagtggtggagaagatgggactggtgtatcttgttcaatactctccggaccagtttaaaagttccaacattgcgaagaaagaactcagaaaagaattgatggatctgggctttaaagtccgctatataagcgaaaattacaagatgatggcgatcgaaggtacagccactcttcaggcagtacaccctaaccaaaactggagctataatatgattaaagctccggaagcgtgggctattacgtctggatcctctagcgttaaagtagcagtcctggatacagggatcgaccataatcacccatccttggccaacttcgtgaatactaatcttggccggtcgtttgttggaggaaacaccatggatgttcaaggtcatggcacacatgttgctggcacgattgcatcttatgggagtgtaagcggagtgatgcagagtgcgacactgatcccggtcaaagtgctcgataattctggcagcgggtccctttacggtattacgcaaggcatattgtatgccgccgacatcgatgcggacgtcattaacatgtctctgggtggaggaggctataatcagagcatggatgaggctgttcaaacagcagttgctcagggaaccattgtagtagcagcgactggcaatgatggtgcatcgtcgatcagttatcctgctgcctacagcagcgtcattgcggtgggatctgtgacgtccaatcgtacacgatcctcgttttctaactatggatctgggcttgaagttatggcaccgggcagcaacatctacagtacgtatcctaattccagatatacatctttgagtggtacaagcatggctactccgcacgttgcgggcgtagctgggctcattcgcgcagccaacccagacatatctgtcgcgcaagcccgtcagattctgcgggataccgcgcaagaagcaggatcgttcacacagtacggctatggaatcgtcgatgctcatgccgccgttgttgctgcatccggtggtagcggcggc

SEQ ID NO: 1806 - protein, 413 aa, synthetic construct
  REGION 1..413: note = Variant of serine peptidase from Bacillus sinesaloumensis
MADQASQANGNQDVIEGELIVSVEPKNGKPDVSIQSAQSVTGQEDVLKSKGFTIVDTLHVEDSSVKPLVSKNFNKKVVEKMGLVYLVQYSPDQFKSSNIAKKELRKELMDLGFKVRYISENYKMMAIEGTATLQAVHPNQNWSYNMIKAPEAWAITSGSSSVKVAVLDTGIDHNHPSLANFVNTNLGRSFVGGNTMDVQGHGTHVAGTIASYGSVSGVMQSATLIPVKVLDNSGSGSLYGITQGILYAADIDADVINMSLGGGGYNQSMDEAVQTAVAQGTIVVAATGNDGASSISYPAAYSSVIAVGSVTSNRTRSSFSNYGSGLEVMAPGSNIYSTYPNSRYTSLSGTSMATPHVAGVAGLIRAANPDISVAQARQILRDTAQEAGSFTQYGYGIVDAHAAVVAASGGSGG

SEQ ID NO: 1807 - DNA, 1239 bp, synthetic construct
  misc_feature 1..1239: note = Variant of serine peptidase from Bacillus sinesaloumensis
  source 1..1239: mol_type = other DNA
atggcagatcaagctagtcaagctaatggaaaccaggacgtcattgaaggcgagctgatcgtttcagtggaaccgaagaacggtaaacctgatgtgagcattcaaagtgcacaatccgtaacagggcaggaagacgtccttaaatcgaaaggctttacgatcgttgataccttgcatgtagaggatagcagcgtcaagccactcgtctcgaagaatttcaataagaaagtggtggagaagatgggactggtgtatcttgttcaatactctccggaccagtttaaaagttccaacattgcgaagaaagaactcagaaaagaattgatggatctgggctttaaagtccgctatataagcgaaaattacaagatgatggcgatcgaaggtacagccactcttcaggcagtacaccctaaccaaaactggaactataatatgattaaagctccggaagcgtgggctattacgtctggatcctctagcgttaaagtagcagtcctggatacagggatcgaccataatcacccatccttggccaacttcgtgaatactaatcttggccggtcgtttgttggaggaaacaccatggatgttcaaggtcatggcacacatgttgctggcacgattgcatcttatgggagtgtaagcggagtgatgcagagtgcgacactgatcccggtcaaagtgctcgataattctggcagcgggtccctttacggtattacgcaaggcatattgtatgccgccgacatcgatgcggacgtcattaacatgtctctgggtggaggaggctataatcagagcatggatgaggctgttcaaacagcagttgctcagggaaccattgtagtagcagcgactggcaatgatggtgcatcgtcgatcagttatcctgctgcctacagcagcgtcattgcggtgggatctgtgacgtccaatcgtacacgatcctcgttttctaactatggatctgggcttgaagttatggcaccgggcagcaacatctacagtacgtatcctaattccagatatacatctttgagtggtacaagcatggctactccgcacgttgcgggcgtagctgggctcattcgcgcagccaacccagacatatctgtcgcgcaagcccgtcagattctgcgggataccgcgcaagaagcaggatcgttcacacagtacggctatggaatcgtcgatgctcatgccgccgttgttgctgcatccggtggtagcggcggc

SEQ ID NO: 1808 - protein, 413 aa, synthetic construct
  REGION 1..413: note = Variant of serine peptidase from Bacillus sinesaloumensis
MADQASQANGNQDVIEGELIVSVEPKNGKPDVSIQSAQSVTGQEDVLKSKGFTIVDTLHVEDSSVKPLVSKNFNKKVVEKMGLVYLVQYSPDQFKSSNIAKKELRKELMDLGFKVRYISENYKMMAIEGTATLQAVHPNQNWNYNMIKAPEAWAITSGSSSVKVAVLDTGIDHNHPSLANFVNTNLGRSFVGGNTMDVQGHGTHVAGTIASYGSVSGVMQSATLIPVKVLDNSGSGSLYGITQGILYAADIDADVINMSLGGGGYNQSMDEAVQTAVAQGTIVVAATGNDGASSISYPAAYSSVIAVGSVTSNRTRSSFSNYGSGLEVMAPGSNIYSTYPNSRYTSLSGTSMATPHVAGVAGLIRAANPDISVAQARQILRDTAQEAGSFTQYGYGIVDAHAAVVAASGGSGG

SEQ ID NO: 1809 - DNA, 1239 bp, synthetic construct
  misc_feature 1..1239: note = Variant of serine peptidase from Bacillus sinesaloumensis
  source 1..1239: mol_type = other DNA
atggcagatcaagctagtcaagctaatggaaaccaggacgtcattgaaggcgagctgatcgtttcagtggaaccgaagaacggtaaacctgatgtgagcattcaaagtgcacaatccgtaacagggcaggaagacgtccttaaatcgaaaggctttacgatcgttgataccttgcatgtagaggatagcagcgtcaagccactcgtctcgaagaatttcaataagaaagtggtggagaagatgggactggtgtatcttgttcaatactctccggaccagtttaaaagttccaacattgcgaagaaagaactcagaaaagaattgatggatctgggctttaaagtccgctatataagcgaaaattacaagatgatggcgatcgaaggtacagccactcttcaggcagtacaccctaaccaaaactggcattatcagatgattaaagctccggaagcgtgggctattacgtctggatcctctagcgttaaagtagcagtcctggatacagggatcgaccataatcacccatccttggccaacttcgtgaatactaatcttggccggtcgtttgttggaggaaacaccatggatgttcaaggtcatggcacacatgttgctggcacgattgcatcttatgggagtgtaagcggagtgatgcagagtgcgacactgatcccggtcaaagtgctcgataattctggcagcgggtccctttacggtattacgcaaggcatattgtatgccgccgacatcgatgcggacgtcattaacatgtctctgggtggaggaggctataatcagagcatggatgaggctgttcaaacagcagttgctcagggaaccattgtagtagcagcgactggcaatgatggtgcatcgtcgatcagttatcctgctgcctacagcagcgtcattgcggtgggatctgtgacgtccaatcgtacacgatcctcgttttctaactatggatctgggcttgaagttatggcaccgggcagcaacatctacagtacgtatcctaattccagatatacatctttgagtggtacaagcatggctactccgcacgttgcgggcgtagctgggctcattcgcgcagccaacccagacatatctgtcgcgcaagcccgtcagattctgcgggataccgcgcaagaagcaggatcgttcacacagtacggctatggaatcgtcgatgctcatgccgccgttgttgctgcatccggtggtagcggcggc

SEQ ID NO: 1810 - protein, 413 aa, synthetic construct
  REGION 1..413: note = Variant of serine peptidase from Bacillus sinesaloumensis
MADQASQANGNQDVIEGELIVSVEPKNGKPDVSIQSAQSVTGQEDVLKSKGFTIVDTLHVEDSSVKPLVSKNFNKKVVEKMGLVYLVQYSPDQFKSSNIAKKELRKELMDLGFKVRYISENYKMMAIEGTATLQAVHPNQNWHYQMIKAPEAWAITSGSSSVKVAVLDTGIDHNHPSLANFVNTNLGRSFVGGNTMDVQGHGTHVAGTIASYGSVSGVMQSATLIPVKVLDNSGSGSLYGITQGILYAADIDADVINMSLGGGGYNQSMDEAVQTAVAQGTIVVAATGNDGASSISYPAAYSSVIAVGSVTSNRTRSSFSNYGSGLEVMAPGSNIYSTYPNSRYTSLSGTSMATPHVAGVAGLIRAANPDISVAQARQILRDTAQEAGSFTQYGYGIVDAHAAVVAASGGSGG

SEQ ID NO: 1811 - DNA, 1239 bp, synthetic construct
  misc_feature 1..1239: note = Variant of serine peptidase from Bacillus sinesaloumensis
  source 1..1239: mol_type = other DNA
atggcagatcaagctagtcaagctaatggaaaccaggacgtcattgaaggcgagctgatcgtttcagtggaaccgaagaacggtaaacctgatgtgagcattcaaagtgcacaatccgtaacagggcaggaagacgtccttaaatcgaaaggctttacgatcgttgataccttgcatgtagaggatagcagcgtcaagccactcgtctcgaagaatttcaataagaaagtggtggagaagatgggactggtgtatcttgttcaatactctccggaccagtttaaaagttccaacattgcgaagaaagaactcagaaaagaattgatggatctgggctttaaagtccgctatataagcgaaaattacaagatgatggcgatcgaaggtacagccactcttcaggcagtacaccctaaccaaaactggcattatacgatgattaaagctccggaagcgtgggctattacgtctggatcctctagcgttaaagtagcagtcctggatacagggatcgaccataatcacccatccttggccaacttcgtgaatactaatcttggccggtcgtttgttggaggaaacaccatggatgttcaaggtcatggcacacatgttgctggcacgattgcatcttatgggagtgtaagcggagtgatgcagagtgcgacactgatcccggtcaaagtgctcgataattctggcagcgggtccctttacggtattacgcaaggcatattgtatgccgccgacatcgatgcggacgtcattaacatgtctctgggtggaggaggctataatcagagcatggatgaggctgttcaaacagcagttgctcagggaaccattgtagtagcagcgactggcaatgatggtgcatcgtcgatcagttatcctgctgcctacagcagcgtcattgcggtgggatctgtgacgtccaatcgtacacgatcctcgttttctaactatggatctgggcttgaagttatggcaccgggcagcaacatctacagtacgtatcctaattccagatatacatctttgagtggtacaagcatggctactccgcacgttgcgggcgtagctgggctcattcgcgcagccaacccagacatatctgtcgcgcaagcccgtcagattctgcgggataccgcgcaagaagcaggatcgttcacacagtacggctatggaatcgtcgatgctcatgccgccgttgttgctgcatccggtggtagcggcggc

SEQ ID NO: 1812 - protein, 413 aa, synthetic construct
  REGION 1..413: note = Variant of serine peptidase from Bacillus sinesaloumensis
MADQASQANGNQDVIEGELIVSVEPKNGKPDVSIQSAQSVTGQEDVLKSKGFTIVDTLHVEDSSVKPLVSKNFNKKVVEKMGLVYLVQYSPDQFKSSNIAKKELRKELMDLGFKVRYISENYKMMAIEGTATLQAVHPNQNWHYTMIKAPEAWAITSGSSSVKVAVLDTGIDHNHPSLANFVNTNLGRSFVGGNTMDVQGHGTHVAGTIASYGSVSGVMQSATLIPVKVLDNSGSGSLYGITQGILYAADIDADVINMSLGGGGYNQSMDEAVQTAVAQGTIVVAATGNDGASSISYPAAYSSVIAVGSVTSNRTRSSFSNYGSGLEVMAPGSNIYSTYPNSRYTSLSGTSMATPHVAGVAGLIRAANPDISVAQARQILRDTAQEAGSFTQYGYGIVDAHAAVVAASGGSGG

SEQ ID NO: 1813 - DNA, 1239 bp, synthetic construct
  misc_feature 1..1239: note = Variant of serine peptidase from Bacillus sinesaloumensis
  source 1..1239: mol_type = other DNA
atggcagatcaagctagtcaagctaatggaaaccaggacgtcattgaaggcgagctgatcgtttcagtggaaccgaagaacggtaaacctgatgtgagcattcaaagtgcacaatccgtaacagggcaggaagacgtccttaaatcgaaaggctttacgatcgttgataccttgcatgtagaggatagcagcgtcaagccactcgtctcgaagaatttcaataagaaagtggtggagaagatgggactggtgtatcttgttcaatactctccggaccagtttaaaagttccaacattgcgaagaaagaactcagaaaagaattgatggatctgggctttaaagtccgctatataagcgaaaattacaagatgatggcgatcgaaggtacagccactcttcaggcagtacaccctaaccaaaactggcattatgtgatgattaaagctccggaagcgtgggctattacgtctggatcctctagcgttaaagtagcagtcctggatacagggatcgaccataatcacccatccttggccaacttcgtgaatactaatcttggccggtcgtttgttggaggaaacaccatggatgttcaaggtcatggcacacatgttgctggcacgattgcatcttatgggagtgtaagcggagtgatgcagagtgcgacactgatcccggtcaaagtgctcgataattctggcagcgggtccctttacggtattacgcaaggcatattgtatgccgccgacatcgatgcggacgtcattaacatgtctctgggtggaggaggctataatcagagcatggatgaggctgttcaaacagcagttgctcagggaaccattgtagtagcagcgactggcaatgatggtgcatcgtcgatcagttatcctgctgcctacagcagcgtcattgcggtgggatctgtgacgtccaatcgtacacgatcctcgttttctaactatggatctgggcttgaagttatggcaccgggcagcaacatctacagtacgtatcctaattccagatatacatctttgagtggtacaagcatggctactccgcacgttgcgggcgtagctgggctcattcgcgcagccaacccagacatatctgtcgcgcaagcccgtcagattctgcgggataccgcgcaagaagcaggatcgttcacacagtacggctatggaatcgtcgatgctcatgccgccgttgttgctgcatccggtggtagcggcggc

SEQ ID NO: 1814 - protein, 413 aa, synthetic construct
  REGION 1..413: note = Variant of serine peptidase from Bacillus sinesaloumensis
MADQASQANGNQDVIEGELIVSVEPKNGKPDVSIQSAQSVTGQEDVLKSKGFTIVDTLHVEDSSVKPLVSKNFNKKVVEKMGLVYLVQYSPDQFKSSNIAKKELRKELMDLGFKVRYISENYKMMAIEGTATLQAVHPNQNWHYVMIKAPEAWAITSGSSSVKVAVLDTGIDHNHPSLANFVNTNLGRSFVGGNTMDVQGHGTHVAGTIASYGSVSGVMQSATLIPVKVLDNSGSGSLYGITQGILYAADIDADVINMSLGGGGYNQSMDEAVQTAVAQGTIVVAATGNDGASSISYPAAYSSVIAVGSVTSNRTRSSFSNYGSGLEVMAPGSNIYSTYPNSRYTSLSGTSMATPHVAGVAGLIRAANPDISVAQARQILRDTAQEAGSFTQYGYGIVDAHAAVVAASGGSGG

SEQ ID NO: 1815 - DNA, 1239 bp, synthetic construct
  misc_feature 1..1239: note = Variant of serine peptidase from Bacillus sinesaloumensis
  source 1..1239: mol_type = other DNA
atggcagatcaagctagtcaagctaatggaaaccaggacgtcattgaaggcgagctgatcgtttcagtggaaccgaagaacggtaaacctgatgtgagcattcaaagtgcacaatccgtaacagggcaggaagacgtccttaaatcgaaaggctttacgatcgttgataccttgcatgtagaggatagcagcgtcaagccactcgtctcgaagaatttcaataagaaagtggtggagaagatgggactggtgtatcttgttcaatactctccggaccagtttaaaagttccaacattgcgaagaaagaactcagaaaagaattgatggatctgggctttaaagtccgctatataagcgaaaattacaagatgatggcgatcgaaggtacagccactcttcaggcagtacaccctaaccaaaactggcattatcatatgattaaagctccggaagcgtgggctattacgtctggatcctctagcgttaaagtagcagtcctggatacagggatcgaccataatcacccatccttggccaacttcgtgaatactaatcttggccggtcgtttgttggaggaaacaccatggatgttcaaggtcatggcacacatgttgctggcacgattgcatcttatgggagtgtaagcggagtgatgcagagtgcgacactgatcccggtcaaagtgctcgataattctggcagcgggtccctttacggtattacgcaaggcatattgtatgccgccgacatcgatgcggacgtcattaacatgtctctgggtggaggaggctataatcagagcatggatgaggctgttcaaacagcagttgctcagggaaccattgtagtagcagcgactggcaatgatggtgcatcgtcgatcagttatcctgctgcctacagcagcgtcattgcggtgggatctgtgacgtccaatcgtacacgatcctcgttttctaactatggatctgggcttgaagttatggcaccgggcagcaacatctacagtacgtatcctaattccagatatacatctttgagtggtacaagcatggctactccgcacgttgcgggcgtagctgggctcattcgcgcagccaacccagacatatctgtcgcgcaagcccgtcagattctgcgggataccgcgcaagaagcaggatcgttcacacagtacggctatggaatcgtcgatgctcatgccgccgttgttgctgcatccggtggtagcggcggc

SEQ ID NO: 1816 - protein, 413 aa, synthetic construct
  REGION 1..413: note = Variant of serine peptidase from Bacillus sinesaloumensis
MADQASQANGNQDVIEGELIVSVEPKNGKPDVSIQSAQSVTGQEDVLKSKGFTIVDTLHVEDSSVKPLVSKNFNKKVVEKMGLVYLVQYSPDQFKSSNIAKKELRKELMDLGFKVRYISENYKMMAIEGTATLQAVHPNQNWHYHMIKAPEAWAITSGSSSVKVAVLDTGIDHNHPSLANFVNTNLGRSFVGGNTMDVQGHGTHVAGTIASYGSVSGVMQSATLIPVKVLDNSGSGSLYGITQGILYAADIDADVINMSLGGGGYNQSMDEAVQTAVAQGTIVVAATGNDGASSISYPAAYSSVIAVGSVTSNRTRSSFSNYGSGLEVMAPGSNIYSTYPNSRYTSLSGTSMATPHVAGVAGLIRAANPDISVAQARQILRDTAQEAGSFTQYGYGIVDAHAAVVAASGGSGG

SEQ ID NO: 1817 - DNA, 1239 bp, synthetic construct
  misc_feature 1..1239: note = Variant of serine peptidase from Bacillus sinesaloumensis
  source 1..1239: mol_type = other DNA
atggcagatcaagctagtcaagctaatggaaaccaggacgtcattgaaggcgagctgatcgtttcagtggaaccgaagaacggtaaacctgatgtgagcattcaaagtgcacaatccgtaacagggcaggaagacgtccttaaatcgaaaggctttacgatcgttgataccttgcatgtagaggatagcagcgtcaagccactcgtctcgaagaatttcaataagaaagtggtggagaagatgggactggtgtatcttgttcaatactctccggaccagtttaaaagttccaacattgcgaagaaagaactcagaaaagaattgatggatctgggctttaaagtccgctatataagcgaaaattacaagatgatggcgatcgaaggtacagccactcttcaggcagtacaccctaaccaaaactggcattatctgatgattaaagctccggaagcgtgggctattacgtctggatcctctagcgttaaagtagcagtcctggatacagggatcgaccataatcacccatccttggccaacttcgtgaatactaatcttggccggtcgtttgttggaggaaacaccatggatgttcaaggtcatggcacacatgttgctggcacgattgcatcttatgggagtgtaagcggagtgatgcagagtgcgacactgatcccggtcaaagtgctcgataattctggcagcgggtccctttacggtattacgcaaggcatattgtatgccgccgacatcgatgcggacgtcattaacatgtctctgggtggaggaggctataatcagagcatggatgaggctgttcaaacagcagttgctcagggaaccattgtagtagcagcgactggcaatgatggtgcatcgtcgatcagttatcctgctgcctacagcagcgtcattgcggtgggatctgtgacgtccaatcgtacacgatcctcgttttctaactatggatctgggcttgaagttatggcaccgggcagcaacatctacagtacgtatcctaattccagatatacatctttgagtggtacaagcatggctactccgcacgttgcgggcgtagctgggctcattcgcgcagccaacccagacatatctgtcgcgcaagcccgtcagattctgcgggataccgcgcaagaagcaggatcgttcacacagtacggctatggaatcgtcgatgctcatgccgccgttgttgctgcatccggtggtagcggcggc

SEQ ID NO: 1818 - protein, 413 aa, synthetic construct
  REGION 1..413: note = Variant of serine peptidase from Bacillus sinesaloumensis
MADQASQANGNQDVIEGELIVSVEPKNGKPDVSIQSAQSVTGQEDVLKSKGFTIVDTLHVEDSSVKPLVSKNFNKKVVEKMGLVYLVQYSPDQFKSSNIAKKELRKELMDLGFKVRYISENYKMMAIEGTATLQAVHPNQNWHYLMIKAPEAWAITSGSSSVKVAVLDTGIDHNHPSLANFVNTNLGRSFVGGNTMDVQGHGTHVAGTIASYGSVSGVMQSATLIPVKVLDNSGSGSLYGITQGILYAADIDADVINMSLGGGGYNQSMDEAVQTAVAQGTIVVAATGNDGASSISYPAAYSSVIAVGSVTSNRTRSSFSNYGSGLEVMAPGSNIYSTYPNSRYTSLSGTSMATPHVAGVAGLIRAANPDISVAQARQILRDTAQEAGSFTQYGYGIVDAHAAVVAASGGSGG

SEQ ID NO: 1819 - DNA, 1239 bp, synthetic construct; identical to SEQ ID NO: 519
  misc_feature 1..1239: note = Variant of serine peptidase from Bacillus sinesaloumensis
  source 1..1239: mol_type = other DNA

SEQ ID NO: 1820 - protein, 413 aa, synthetic construct; identical to SEQ ID NO: 520
  REGION 1..413: note = Variant of serine peptidase from Bacillus sinesaloumensis

SEQ ID NO: 1821 - DNA, 1239 bp, synthetic construct; identical to SEQ ID NO: 313
  misc_feature 1..1239: note = Variant of serine peptidase from Bacillus sinesaloumensis
  source 1..1239: mol_type = other DNA

SEQ ID NO: 1822 - protein, 413 aa, synthetic construct; identical to SEQ ID NO: 314
  REGION 1..413: note = Variant of serine peptidase from Bacillus sinesaloumensis

SEQ ID NO: 1823 - DNA, 1239 bp, synthetic construct
  misc_feature 1..1239: note = Variant of serine peptidase from Bacillus sinesaloumensis
  source 1..1239: mol_type = other DNA
atggcagatcaagctagtcaagctaatggaaaccaggacgtcattgaaggcgagctgatcgtttcagtggaaccgaagaacggtaaacctgatgtgagcattcaaagtgcacaatccgtaacagggcaggaagacgtccttaaatcgaaaggctttacgatcgttgataccttgcatgtagaggatagcagcgtcaagccactcgtctcgaagaatttcaataagaaagtggtggagaagatgggactggtgtatcttgttcaatactctccggaccagtttaaaagttccaacattgcgaagaaagaactcagaaaagaattgatggatctgggctttaaagtccgctatataagcgaaaattacaagatgatggcgatcgaaggtacagccactcttcaggcagtacaccctaaccaaaactggcattatgatatgattaaagctccggaagcgtgggctattacgtctggatcctctagcgttaaagtagcagtcctggatacagggatcgaccataatcacccatccttggccaacttcgtgaatactaatcttggccggtcgtttgttggaggaaacaccatggatgttcaaggtcatggcacacatgttgctggcacgattgcatcttatgggagtgtaagcggagtgatgcagagtgcgacactgatcccggtcaaagtgctcgataattctggcagcgggtccctttacggtattacgcaaggcatattgtatgccgccgacatcgatgcggacgtcattaacatgtctctgggtggaggaggctataatcagagcatggatgaggctgttcaaacagcagttgctcagggaaccattgtagtagcagcgactggcaatgatggtgcatcgtcgatcagttatcctgctgcctacagcagcgtcattgcggtgggatctgtgacgtccaatcgtacacgatcctcgttttctaactatggatctgggcttgaagttatggcaccgggcagcaacatctacagtacgtatcctaattccagatatacatctttgagtggtacaagcatggctactccgcacgttgcgggcgtagctgggctcattcgcgcagccaacccagacatatctgtcgcgcaagcccgtcagattctgcgggataccgcgcaagaagcaggatcgttcacacagtacggctatggaatcgtcgatgctcatgccgccgttgttgctgcatccggtggtagcggcggc

SEQ ID NO: 1824 - protein, 413 aa, synthetic construct
  REGION 1..413: note = Variant of serine peptidase from Bacillus sinesaloumensis
MADQASQANGNQDVIEGELIVSVEPKNGKPDVSIQSAQSVTGQEDVLKSKGFTIVDTLHVEDSSVKPLVSKNFNKKVVEKMGLVYLVQYSPDQFKSSNIAKKELRKELMDLGFKVRYISENYKMMAIEGTATLQAVHPNQNWHYDMIKAPEAWAITSGSSSVKVAVLDTGIDHNHPSLANFVNTNLGRSFVGGNTMDVQGHGTHVAGTIASYGSVSGVMQSATLIPVKVLDNSGSGSLYGITQGILYAADIDADVINMSLGGGGYNQSMDEAVQTAVAQGTIVVAATGNDGASSISYPAAYSSVIAVGSVTSNRTRSSFSNYGSGLEVMAPGSNIYSTYPNSRYTSLSGTSMATPHVAGVAGLIRAANPDISVAQARQILRDTAQEAGSFTQYGYGIVDAHAAVVAASGGSGG

SEQ ID NO: 1825 - DNA, 1239 bp, synthetic construct; identical to SEQ ID NO: 313
  misc_feature 1..1239: note = Variant of serine peptidase from Bacillus sinesaloumensis
  source 1..1239: mol_type = other DNA

SEQ ID NO: 1826 - protein, 413 aa, synthetic construct; identical to SEQ ID NO: 314
  REGION 1..413: note = Variant of serine peptidase from Bacillus sinesaloumensis

SEQ ID NO: 1827 - DNA, 1239 bp, synthetic construct; identical to SEQ ID NO: 535
  misc_feature 1..1239: note = Variant of serine peptidase from Bacillus sinesaloumensis
  source 1..1239: mol_type = other DNA

SEQ ID NO: 1828 - protein, 413 aa, synthetic construct; identical to SEQ ID NO: 536
  REGION 1..413: note = Variant of serine peptidase from Bacillus sinesaloumensis

SEQ ID NO: 1829 - DNA, 1239 bp, synthetic construct
  misc_feature 1..1239: note = Variant of serine peptidase from Bacillus sinesaloumensis
  source 1..1239: mol_type = other DNA
atggcagatcaagctagtcaagctaatggaaaccaggacgtcattgaaggcgagctgatcgtttcagtggaaccgaagaacggtaaacctgatgtgagcattcaaagtgcacaatccgtaacagggcaggaagacgtccttaaatcgaaaggctttacgatcgttgataccttgcatgtagaggatagcagcgtcaagccactcgtctcgaagaatttcaataagaaagtggtggagaagatgggactggtgtatcttgttcaatactctccggaccagtttaaaagttccaacattgcgaagaaagaactcagaaaagaattgatggatctgggctttaaagtccgctatataagcgaaaattacaagatgatggcgatcgaaggtacagccactcttcaggcagtacaccctaaccaaaactggcattattttatgattaaagctccggaagcgtgggctattacgtctggatcctctagcgttaaagtagcagtcctggatacagggatcgaccataatcacccatccttggccaacttcgtgaatactaatcttggccggtcgtttgttggaggaaacaccatggatgttcaaggtcatggcacacatgttgctggcacgattgcatcttatgggagtgtaagcggagtgatgcagagtgcgacactgatcccggtcaaagtgctcgataattctggcagcgggtccctttacggtattacgcaaggcatattgtatgccgccgacatcgatgcggacgtcattaacatgtctctgggtggaggaggctataatcagagcatggatgaggctgttcaaacagcagttgctcagggaaccattgtagtagcagcgactggcaatgatggtgcatcgtcgatcagttatcctgctgcctacagcagcgtcattgcggtgggatctgtgacgtccaatcgtacacgatcctcgttttctaactatggatctgggcttgaagttatggcaccgggcagcaacatctacagtacgtatcctaattccagatatacatctttgagtggtacaagcatggctactccgcacgttgcgggcgtagctgggctcattcgcgcagccaacccagacatatctgtcgcgcaagcccgtcagattctgcgggataccgcgcaagaagcaggatcgttcacacagtacggctatggaatcgtcgatgctcatgccgccgttgttgctgcatccggtggtagcggcggc

SEQ ID NO: 1830 - protein, 413 aa, synthetic construct
  REGION 1..413: note = Variant of serine peptidase from Bacillus sinesaloumensis
MADQASQANGNQDVIEGELIVSVEPKNGKPDVSIQSAQSVTGQEDVLKSKGFTIVDTLHVEDSSVKPLVSKNFNKKVVEKMGLVYLVQYSPDQFKSSNIAKKELRKELMDLGFKVRYISENYKMMAIEGTATLQAVHPNQNWHYFMIKAPEAWAITSGSSSVKVAVLDTGIDHNHPSLANFVNTNLGRSFVGGNTMDVQGHGTHVAGTIASYGSVSGVMQSATLIPVKVLDNSGSGSLYGITQGILYAADIDADVINMSLGGGGYNQSMDEAVQTAVAQGTIVVAATGNDGASSISYPAAYSSVIAVGSVTSNRTRSSFSNYGSGLEVMAPGSNIYSTYPNSRYTSLSGTSMATPHVAGVAGLIRAANPDISVAQARQILRDTAQEAGSFTQYGYGIVDAHAAVVAASGGSGG

SEQ ID NO: 1831 - DNA, 1239 bp, synthetic construct
  misc_feature 1..1239: note = Variant of serine peptidase from Bacillus sinesaloumensis
  source 1..1239: mol_type = other DNA
atggcagatcaagctagtcaagctaatggaaaccaggacgtcattgaaggcgagctgatcgtttcagtggaaccgaagaacggtaaacctgatgtgagcattcaaagtgcacaatccgtaacagggcaggaagacgtccttaaatcgaaaggctttacgatcgttgataccttgcatgtagaggatagcagcgtcaagccactcgtctcgaagaatttcaataagaaagtggtggagaagatgggactggtgtatcttgttcaatactctccggaccagtttaaaagttccaacattgcgaagaaagaactcagaaaagaattgatggatctgggctttaaagtccgctatataagcgaaaattacaagatgatggcgatcgaaggtacagccactcttcaggcagtacaccctaaccaaaactggcattattcgatgattaaagctccggaagcgtgggctattacgtctggatcctctagcgttaaagtagcagtcctggatacagggatcgaccataatcacccatccttggccaacttcgtgaatactaatcttggccggtcgtttgttggaggaaacaccatggatgttcaaggtcatggcacacatgttgctggcacgattgcatcttatgggagtgtaagcggagtgatgcagagtgcgacactgatcccggtcaaagtgctcgataattctggcagcgggtccctttacggtattacgcaaggcatattgtatgccgccgacatcgatgcggacgtcattaacatgtctctgggtggaggaggctataatcagagcatggatgaggctgttcaaacagcagttgctcagggaaccattgtagtagcagcgactggcaatgatggtgcatcgtcgatcagttatcctgctgcctacagcagcgtcattgcggtgggatctgtgacgtccaatcgtacacgatcctcgttttctaactatggatctgggcttgaagttatggcaccgggcagcaacatctacagtacgtatcctaattccagatatacatctttgagtggtacaagcatggctactccgcacgttgcgggcgtagctgggctcattcgcgcagccaacccagacatatctgtcgcgcaagcccgtcagattctgcgggataccgcgcaagaagcaggatcgttcacacagtacggctatggaatcgtcgatgctcatgccgccgttgttgctgcatccggtggtagcggcggc

SEQ ID NO: 1832 - protein, 413 aa, synthetic construct
  REGION 1..413: note = Variant of serine peptidase from Bacillus sinesaloumensis
MADQASQANGNQDVIEGELIVSVEPKNGKPDVSIQSAQSVTGQEDVLKSKGFTIVDTLHVEDSSVKPLVSKNFNKKVVEKMGLVYLVQYSPDQFKSSNIAKKELRKELMDLGFKVRYISENYKMMAIEGTATLQAVHPNQNWHYSMIKAPEAWAITSGSSSVKVAVLDTGIDHNHPSLANFVNTNLGRSFVGGNTMDVQGHGTHVAGTIASYGSVSGVMQSATLIPVKVLDNSGSGSLYGITQGILYAADIDADVINMSLGGGGYNQSMDEAVQTAVAQGTIVVAATGNDGASSISYPAAYSSVIAVGSVTSNRTRSSFSNYGSGLEVMAPGSNIYSTYPNSRYTSLSGTSMATPHVAGVAGLIRAANPDISVAQARQILRDTAQEAGSFTQYGYGIVDAHAAVVAASGGSGG

SEQ ID NO: 1833 - DNA, 1239 bp, synthetic construct
  misc_feature 1..1239: note = Variant of serine peptidase from Bacillus sinesaloumensis
  source 1..1239: mol_type = other DNA
atggcagatcaagctagtcaagctaatggaaaccaggacgtcattgaaggcgagctgatcgtttcagtggaaccgaagaacggtaaacctgatgtgagcattcaaagtgcacaatccgtaacagggcaggaagacgtccttaaatcgaaaggctttacgatcgttgataccttgcatgtagaggatagcagcgtcaagccactcgtctcgaagaatttcaataagaaagtggtggagaagatgggactggtgtatcttgttcaatactctccggaccagtttaaaagttccaacattgcgaagaaagaactcagaaaagaattgatggatctgggctttaaagtccgctatataagcgaaaattacaagatgatggcgatcgaaggtacagccactcttcaggcagtacaccctaaccaaaactggcattatggtatgattaaagctccggaagcgtgggctattacgtctggatcctctagcgttaaagtagcagtcctggatacagggatcgaccataatcacccatccttggccaacttcgtgaatactaatcttggccggtcgtttgttggaggaaacaccatggatgttcaaggtcatggcacacatgttgctggcacgattgcatcttatgggagtgtaagcggagtgatgcagagtgcgacactgatcccggtcaaagtgctcgataattctggcagcgggtccctttacggtattacgcaaggcatattgtatgccgccgacatcgatgcggacgtcattaacatgtctctgggtggaggaggctataatcagagcatggatgaggctgttcaaacagcagttgctcagggaaccattgtagtagcagcgactggcaatgatggtgcatcgtcgatcagttatcctgctgcctacagcagcgtcattgcggtgggatctgtgacgtccaatcgtacacgatcctcgttttctaactatggatctgggcttgaagttatggcaccgggcagcaacatctacagtacgtatcctaattccagatatacatctttgagtggtacaagcatggctactccgcacgttgcgggcgtagctgggctcattcgcgcagccaacccagacatatctgtcgcgcaagcccgtcagattctgcgggataccgcgcaagaagcaggatcgttcacacagtacggctatggaatcgtcgatgctcatgccgccgttgttgctgcatccggtggtagcggcggc

SEQ ID NO: 1834 - protein, 413 aa, synthetic construct
  REGION 1..413: note = Variant of serine peptidase from Bacillus sinesaloumensis
MADQASQANGNQDVIEGELIVSVEPKNGKPDVSIQSAQSVTGQEDVLKSKGFTIVDTLHVEDSSVKPLVSKNFNKKVVEKMGLVYLVQYSPDQFKSSNIAKKELRKELMDLGFKVRYISENYKMMAIEGTATLQAVHPNQNWHYGMIKAPEAWAITSGSSSVKVAVLDTGIDHNHPSLANFVNTNLGRSFVGGNTMDVQGHGTHVAGTIASYGSVSGVMQSATLIPVKVLDNSGSGSLYGITQGILYAADIDADVINMSLGGGGYNQSMDEAVQTAVAQGTIVVAATGNDGASSISYPAAYSSVIAVGSVTSNRTRSSFSNYGSGLEVMAPGSNIYSTYPNSRYTSLSGTSMATPHVAGVAGLIRAANPDISVAQARQILRDTAQEAGSFTQYGYGIVDAHAAVVAASGGSGG

SEQ ID NO: 1835 - DNA, 1239 bp, synthetic construct
  misc_feature 1..1239: note = Variant of serine peptidase from Bacillus sinesaloumensis
  source 1..1239: mol_type = other DNA
atggcagatcaagctagtcaagctaatggaaaccaggacgtcattgaaggcgagctgatcgtttcagtggaaccgaagaacggtaaacctgatgtgagcattcaaagtgcacaatccgtaacagggcaggaagacgtccttaaatcgaaaggctttacgatcgttgataccttgcatgtagaggatagcagcgtcaagccactcgtctcgaagaatttcaataagaaagtggtggagaagatgggactggtgtatcttgttcaatactctccggaccagtttaaaagttccaacattgcgaagaaagaactcagaaaagaattgatggatctgggctttaaagtccgctatataagcgaaaattacaagatgatggcgatcgaaggtacagccactcttcaggcagtacaccctaaccaaaactggcattatattatgattaaagctccggaagcgtgggctattacgtctggatcctctagcgttaaagtagcagtcctggatacagggatcgaccataatcacccatccttggccaacttcgtgaatactaatcttggccggtcgtttgttggaggaaacaccatggatgttcaaggtcatggcacacatgttgctggcacgattgcatcttatgggagtgtaagcggagtgatgcagagtgcgacactgatcccggtcaaagtgctcgataattctggcagcgggtccctttacggtattacgcaaggcatattgtatgccgccgacatcgatgcggacgtcattaacatgtctctgggtggaggaggctataatcagagcatggatgaggctgttcaaacagcagttgctcagggaaccattgtagtagcagcgactggcaatgatggtgcatcgtcgatcagttatcctgctgcctacagcagcgtcattgcggtgggatctgtgacgtccaatcgtacacgatcctcgttttctaactatggatctgggcttgaagttatggcaccgggcagcaacatctacagtacgtatcctaattccagatatacatctttgagtggtacaagcatggctactccgcacgttgcgggcgtagctgggctcattcgcgcagccaacccagacatatctgtcgcgcaagcccgtcagattctgcgggataccgcgcaagaagcaggatcgttcacacagtacggctatggaatcgtcgatgctcatgccgccgttgttgctgcatccggtggtagcggcggc

SEQ ID NO: 1836 - protein, 413 aa, synthetic construct
  REGION 1..413: note = Variant of serine peptidase from Bacillus sinesaloumensis
MADQASQANGNQDVIEGELIVSVEPKNGKPDVSIQSAQSVTGQEDVLKSKGFTIVDTLHVEDSSVKPLVSKNFNKKVVEKMGLVYLVQYSPDQFKSSNIAKKELRKELMDLGFKVRYISENYKMMAIEGTATLQAVHPNQNWHYIMIKAPEAWAITSGSSSVKVAVLDTGIDHNHPSLANFVNTNLGRSFVGGNTMDVQGHGTHVAGTIASYGSVSGVMQSATLIPVKVLDNSGSGSLYGITQGILYAADIDADVINMSLGGGGYNQSMDEAVQTAVAQGTIVVAATGNDGASSISYPAAYSSVIAVGSVTSNRTRSSFSNYGSGLEVMAPGSNIYSTYPNSRYTSLSGTSMATPHVAGVAGLIRAANPDISVAQARQILRDTAQEAGSFTQYGYGIVDAHAAVVAASGGSGG

SEQ ID NO: 1837 - DNA, 1239 bp, synthetic construct
  misc_feature 1..1239: note = Variant of serine peptidase from Bacillus sinesaloumensis
  source 1..1239: mol_type = other DNA
atggcagatcaagctagtcaagctaatggaaaccaggacgtcattgaaggcgagctgatcgtttcagtggaaccgaagaacggtaaacctgatgtgagcattcaaagtgcacaatccgtaacagggcaggaagacgtccttaaatcgaaaggctttacgatcgttgataccttgcatgtagaggatagcagcgtcaagccactcgtctcgaagaatttcaataagaaagtggtggagaagatgggactggtgtatcttgttcaatactctccggaccagtttaaaagttccaacattgcgaagaaagaactcagaaaagaattgatggatctgggctttaaagtccgctatataagcgaaaattacaagatgatggcgatcgaaggtacagccactcttcaggcagtacaccctaaccaaaactggcattataagatgattaaagctccggaagcgtgggctattacgtctggatcctctagcgttaaagtagcagtcctggatacagggatcgaccataatcacccatccttggccaacttcgtgaatactaatcttggccggtcgtttgttggaggaaacaccatggatgttcaaggtcatggcacacatgttgctggcacgattgcatcttatgggagtgtaagcggagtgatgcagagtgcgacactgatcccggtcaaagtgctcgataattctggcagcgggtccctttacggtattacgcaaggcatattgtatgccgccgacatcgatgcggacgtcattaacatgtctctgggtggaggaggctataatcagagcatggatgaggctgttcaaacagcagttgctcagggaaccattgtagtagcagcgactggcaatgatggtgcatcgtcgatcagttatcctgctgcctacagcagcgtcattgcggtgggatctgtgacgtccaatcgtacacgatcctcgttttctaactatggatctgggcttgaagttatggcaccgggcagcaacatctacagtacgtatcctaattccagatatacatctttgagtggtacaagcatggctactccgcacgttgcgggcgtagctgggctcattcgcgcagccaacccagacatatctgtcgcgcaagcccgtcagattctgcgggataccgcgcaagaagcaggatcgttcacacagtacggctatggaatcgtcgatgctcatgccgccgttgttgctgcatccggtggtagcggcggc

SEQ ID NO: 1838 - protein, 413 aa, synthetic construct
  REGION 1..413: note = Variant of serine peptidase from Bacillus sinesaloumensis
MADQASQANGNQDVIEGELIVSVEPKNGKPDVSIQSAQSVTGQEDVLKSKGFTIVDTLHVEDSSVKPLVSKNFNKKVVEKMGLVYLVQYSPDQFKSSNIAKKELRKELMDLGFKVRYISENYKMMAIEGTATLQAVHPNQNWHYKMIKAPEAWAITSGSSSVKVAVLDTGIDHNHPSLANFVNTNLGRSFVGGNTMDVQGHGTHVAGTIASYGSVSGVMQSATLIPVKVLDNSGSGSLYGITQGILYAADIDADVINMSLGGGGYNQSMDEAVQTAVAQGTIVVAATGNDGASSISYPAAYSSVIAVGSVTSNRTRSSFSNYGSGLEVMAPGSNIYSTYPNSRYTSLSGTSMATPHVAGVAGLIRAANPDISVAQARQILRDTAQEAGSFTQYGYGIVDAHAAVVAASGGSGG

SEQ ID NO: 1839 - DNA, 1239 bp, synthetic construct; identical to SEQ ID NO: 377
  misc_feature 1..1239: note = Variant of serine peptidase from Bacillus sinesaloumensis
  source 1..1239: mol_type = other DNA

SEQ ID NO: 1840 - protein, 413 aa, synthetic construct; identical to SEQ ID NO: 378
  REGION 1..413: note = Variant of serine peptidase from Bacillus sinesaloumensis

SEQ ID NO: 1841 - DNA, 1239 bp, synthetic construct
  misc_feature 1..1239: note = Variant of serine peptidase from Bacillus sinesaloumensis
  source 1..1239: mol_type = other DNA
atggcagatcaagctagtcaagctaatggaaaccaggacgtcattgaaggcgagctgatcgtttcagtggaaccgaagaacggtaaacctgatgtgagcattcaaagtgcacaatccgtaacagggcaggaagacgtccttaaatcgaaaggctttacgatcgttgataccttgcatgtagaggatagcagcgtcaagccactcgtctcgaagaatttcaataagaaagtggtggagaagatgggactggtgtatcttgttcaatactctccggaccagtttaaaagttccaacattgcgaagaaagaactcagaaaagaattgatggatctgggctttaaagtccgctatataagcgaaaattacaagatgatggcgatcgaaggtacagccactcttcaggcagtacaccctaaccaaaactggcattattgcatgattaaagctccggaagcgtgggctattacgtctggatcctctagcgttaaagtagcagtcctggatacagggatcgaccataatcacccatccttggccaacttcgtgaatactaatcttggccggtcgtttgttggaggaaacaccatggatgttcaaggtcatggcacacatgttgctggcacgattgcatcttatgggagtgtaagcggagtgatgcagagtgcgacactgatcccggtcaaagtgctcgataattctggcagcgggtccctttacggtattacgcaaggcatattgtatgccgccgacatcgatgcggacgtcattaacatgtctctgggtggaggaggctataatcagagcatggatgaggctgttcaaacagcagttgctcagggaaccattgtagtagcagcgactggcaatgatggtgcatcgtcgatcagttatcctgctgcctacagcagcgtcattgcggtgggatctgtgacgtccaatcgtacacgatcctcgttttctaactatggatctgggcttgaagttatggcaccgggcagcaacatctacagtacgtatcctaattccagatatacatctttgagtggtacaagcatggctactccgcacgttgcgggcgtagctgggctcattcgcgcagccaacccagacatatctgtcgcgcaagcccgtcagattctgcgggataccgcgcaagaagcaggatcgttcacacagtacggctatggaatcgtcgatgctcatgccgccgttgttgctgcatccggtggtagcggcggc

SEQ ID NO: 1842 - protein, 413 aa, synthetic construct
  REGION 1..413: note = Variant of serine peptidase from Bacillus sinesaloumensis
MADQASQANGNQDVIEGELIVSVEPKNGKPDVSIQSAQSVTGQEDVLKSKGFTIVDTLHVEDSSVKPLVSKNFNKKVVEKMGLVYLVQYSPDQFKSSNIAKKELRKELMDLGFKVRYISENYKMMAIEGTATLQAVHPNQNWHYCMIKAPEAWAITSGSSSVKVAVLDTGIDHNHPSLANFVNTNLGRSFVGGNTMDVQGHGTHVAGTIASYGSVSGVMQSATLIPVKVLDNSGSGSLYGITQGILYAADIDADVINMSLGGGGYNQSMDEAVQTAVAQGTIVVAATGNDGASSISYPAAYSSVIAVGSVTSNRTRSSFSNYGSGLEVMAPGSNIYSTYPNSRYTSLSGTSMATPHVAGVAGLIRAANPDISVAQARQILRDTAQEAGSFTQYGYGIVDAHAAVVAASGGSGG

SEQ ID NO: 1843 - DNA, 1239 bp, synthetic construct
  misc_feature 1..1239: note = Variant of serine peptidase from Bacillus sinesaloumensis
  source 1..1239: mol_type = other DNA
atggcagatcaagctagtcaagctaatggaaaccaggacgtcattgaaggcgagctgatcgtttcagtggaaccgaagaacggtaaacctgatgtgagcattcaaagtgcacaatccgtaacagggcaggaagacgtccttaaatcgaaaggctttacgatcgttgataccttgcatgtagaggatagcagcgtcaagccactcgtctcgaagaatttcaataagaaagtggtggagaagatgggactggtgtatcttgttcaatactctccggaccagtttaaaagttccaacattgcgaagaaagaactcagaaaagaattgatggatctgggctttaaagtccgctatataagcgaaaattacaagatgatggcgatcgaaggtacagccactcttcaggcagtacaccctaaccaaaactggcattattggatgattaaagctccggaagcgtgggctattacgtctggatcctctagcgttaaagtagcagtcctggatacagggatcgaccataatcacccatccttggccaacttcgtgaatactaatcttggccggtcgtttgttggaggaaacaccatggatgttcaaggtcatggcacacatgttgctggcacgattgcatcttatgggagtgtaagcggagtgatgcagagtgcgacactgatcccggtcaaagtgctcgataattctggcagcgggtccctttacggtattacgcaaggcatattgtatgccgccgacatcgatgcggacgtcattaacatgtctctgggtggaggaggctataatcagagcatggatgaggctgttcaaacagcagttgctcagggaaccattgtagtagcagcgactggcaatgatggtgcatcgtcgatcagttatcctgctgcctacagcagcgtcattgcggtgggatctgtgacgtccaatcgtacacgatcctcgttttctaactatggatctgggcttgaagttatggcaccgggcagcaacatctacagtacgtatcctaattccagatatacatctttgagtggtacaagcatggctactccgcacgttgcgggcgtagctgggctcattcgcgcagccaacccagacatatctgtcgcgcaagcccgtcagattctgcgggataccgcgcaagaagcaggatcgttcacacagtacggctatggaatcgtcgatgctcatgccgccgttgttgctgcatccggtggtagcggcggc

SEQ ID NO: 1844 - protein, 413 aa, synthetic construct
  REGION 1..413: note = Variant of serine peptidase from Bacillus sinesaloumensis
MADQASQANGNQDVIEGELIVSVEPKNGKPDVSIQSAQSVTGQEDVLKSKGFTIVDTLHVEDSSVKPLVSKNFNKKVVEKMGLVYLVQYSPDQFKSSNIAKKELRKELMDLGFKVRYISENYKMMAIEGTATLQAVHPNQNWHYWMIKAPEAWAITSGSSSVKVAVLDTGIDHNHPSLANFVNTNLGRSFVGGNTMDVQGHGTHVAGTIASYGSVSGVMQSATLIPVKVLDNSGSGSLYGITQGILYAADIDADVINMSLGGGGYNQSMDEAVQTAVAQGTIVVAATGNDGASSISYPAAYSSVIAVGSVTSNRTRSSFSNYGSGLEVMAPGSNIYSTYPNSRYTSLSGTSMATPHVAGVAGLIRAANPDISVAQARQILRDTAQEAGSFTQYGYGIVDAHAAVVAASGGSGG

SEQ ID NO: 1845 - DNA, 1239 bp, synthetic construct
  misc_feature 1..1239: note = Variant of serine peptidase from Bacillus sinesaloumensis
  source 1..1239: mol_type = other DNA
atggcagatcaagctagtcaagctaatggaaaccaggacgtcattgaaggcgagctgatcgtttcagtggaaccgaagaacggtaaacctgatgtgagcattcaaagtgcacaatccgtaacagggcaggaagacgtccttaaatcgaaaggctttacgatcgttgataccttgcatgtagaggatagcagcgtcaagccactcgtctcgaagaatttcaataagaaagtggtggagaagatgggactggtgtatcttgttcaatactctccggaccagtttaaaagttccaacattgcgaagaaagaactcagaaaagaattgatggatctgggctttaaagtccgctatataagcgaaaattacaagatgatggcgatcgaaggtacagccactcttcaggcagtacaccctaaccaaaactggcattataatatgattaaagctccggaagcgtgggctattacggcgggatcctctagcgttaaagtagcagtcctggatacagggatcgaccataatcacccatccttggccaacttcgtgaatactaatcttggccggtcgtttgttggaggaaacaccatggatgttcaaggtcatggcacacatgttgctggcacgattgcatcttatgggagtgtaagcggagtgatgcagagtgcgacactgatcccggtcaaagtgctcgataattctggcagcgggtccctttacggtattacgcaaggcatattgtatgccgccgacatcgatgcggacgtcattaacatgtctctgggtggaggaggctataatcagagcatggatgaggctgttcaaacagcagttgctcagggaaccattgtagtagcagcgactggcaatgatggtgcatcgtcgatcagttatcctgctgcctacagcagcgtcattgcggtgggatctgtgacgtccaatcgtacacgatcctcgttttctaactatggatctgggcttgaagttatggcaccgggcagcaacatctacagtacgtatcctaattccagatatacatctttgagtggtacaagcatggctactccgcacgttgcgggcgtagctgggctcattcgcgcagccaacccagacatatctgtcgcgcaagcccgtcagattctgcgggataccgcgcaagaagcaggatcgttcacacagtacggctatggaatcgtcgatgctcatgccgccgttgttgctgcatccggtggtagcggcggc

SEQ ID NO: 1846 - protein, 413 aa, synthetic construct; identical to SEQ ID NO: 664
  REGION 1..413: note = Variant of serine peptidase from Bacillus sinesaloumensis

SEQ ID NO: 1847 - DNA, 1239 bp, synthetic construct
  misc_feature 1..1239: note = Variant of serine peptidase from Bacillus sinesaloumensis
  source 1..1239: mol_type = other DNA
atggcagatcaagctagtcaagctaatggaaaccaggacgtcattgaaggcgagctgatcgtttcagtggaaccgaagaacggtaaacctgatgtgagcattcaaagtgcacaatccgtaacagggcaggaagacgtccttaaatcgaaaggctttacgatcgttgataccttgcatgtagaggatagcagcgtcaagccactcgtctcgaagaatttcaataagaaagtggtggagaagatgggactggtgtatcttgttcaatactctccggaccagtttaaaagttccaacattgcgaagaaagaactcagaaaagaattgatggatctgggctttaaagtccgctatataagcgaaaattacaagatgatggcgatcgaaggtacagccactcttcaggcagtacaccctaaccaaaactggcattataatatgattaaagctccggaagcgtgggctattacggagggatcctctagcgttaaagtagcagtcctggatacagggatcgaccataatcacccatccttggccaacttcgtgaatactaatcttggccggtcgtttgttggaggaaacaccatggatgttcaaggtcatggcacacatgttgctggcacgattgcatcttatgggagtgtaagcggagtgatgcagagtgcgacactgatcccggtcaaagtgctcgataattctggcagcgggtccctttacggtattacgcaaggcatattgtatgccgccgacatcgatgcggacgtcattaacatgtctctgggtggaggaggctataatcagagcatggatgaggctgttcaaacagcagttgctcagggaaccattgtagtagcagcgactggcaatgatggtgcatcgtcgatcagttatcctgctgcctacagcagcgtcattgcggtgggatctgtgacgtccaatcgtacacgatcctcgttttctaactatggatctgggcttgaagttatggcaccgggcagcaacatctacagtacgtatcctaattccagatatacatctttgagtggtacaagcatggctactccgcacgttgcgggcgtagctgggctcattcgcgcagccaacccagacatatctgtcgcgcaagcccgtcagattctgcgggataccgcgcaagaagcaggatcgttcacacagtacggctatggaatcgtcgatgctcatgccgccgttgttgctgcatccggtggtagcggcggc

SEQ ID NO: 1848 - protein, 413 aa, synthetic construct
  REGION 1..413: note = Variant of serine peptidase from Bacillus sinesaloumensis
MADQASQANGNQDVIEGELIVSVEPKNGKPDVSIQSAQSVTGQEDVLKSKGFTIVDTLHVEDSSVKPLVSKNFNKKVVEKMGLVYLVQYSPDQFKSSNIAKKELRKELMDLGFKVRYISENYKMMAIEGTATLQAVHPNQNWHYNMIKAPEAWAITEGSSSVKVAVLDTGIDHNHPSLANFVNTNLGRSFVGGNTMDVQGHGTHVAGTIASYGSVSGVMQSATLIPVKVLDNSGSGSLYGITQGILYAADIDADVINMSLGGGGYNQSMDEAVQTAVAQGTIVVAATGNDGASSISYPAAYSSVIAVGSVTSNRTRSSFSNYGSGLEVMAPGSNIYSTYPNSRYTSLSGTSMATPHVAGVAGLIRAANPDISVAQARQILRDTAQEAGSFTQYGYGIVDAHAAVVAASGGSGG

SEQ ID NO: 1849 - DNA, 1239 bp, synthetic construct
  misc_feature 1..1239: note = Variant of serine peptidase from Bacillus sinesaloumensis
  source 1..1239: mol_type = other DNA
atggcagatcaagctagtcaagctaatggaaaccaggacgtcattgaaggcgagctgatcgtttcagtggaaccgaagaacggtaaacctgatgtgagcattcaaagtgcacaatccgtaacagggcaggaagacgtccttaaatcgaaaggctttacgatcgttgataccttgcatgtagaggatagcagcgtcaagccactcgtctcgaagaatttcaataagaaagtggtggagaagatgggactggtgtatcttgttcaatactctccggaccagtttaaaagttccaacattgcgaagaaagaactcagaaaagaattgatggatctgggctttaaagtccgctatataagcgaaaattacaagatgatggcgatcgaaggtacagccactcttcaggcagtacaccctaaccaaaactggcattataatatgattaaagctccggaagcgtgggctattacgcctggatcctctagcgttaaagtagcagtcctggatacagggatcgaccataatcacccatccttggccaacttcgtgaatactaatcttggccggtcgtttgttggaggaaacaccatggatgttcaaggtcatggcacacatgttgctggcacgattgcatcttatgggagtgtaagcggagtgatgcagagtgcgacactgatcccggtcaaagtgctcgataattctggcagcgggtccctttacggtattacgcaaggcatattgtatgccgccgacatcgatgcggacgtcattaacatgtctctgggtggaggaggctataatcagagcatggatgaggctgttcaaacagcagttgctcagggaaccattgtagtagcagcgactggcaatgatggtgcatcgtcgatcagttatcctgctgcctacagcagcgtcattgcggtgggatctgtgacgtccaatcgtacacgatcctcgttttctaactatggatctgggcttgaagttatggcaccgggcagcaacatctacagtacgtatcctaattccagatatacatctttgagtggtacaagcatggctactccgcacgttgcgggcgtagctgggctcattcgcgcagccaacccagacatatctgtcgcgcaagcccgtcagattctgcgggataccgcgcaagaagcaggatcgttcacacagtacggctatggaatcgtcgatgctcatgccgccgttgttgctgcatccggtggtagcggcggc

SEQ ID NO: 1850 - protein, 413 aa, synthetic construct
  REGION 1..413: note = Variant of serine peptidase from Bacillus sinesaloumensis
MADQASQANGNQDVIEGELIVSVEPKNGKPDVSIQSAQSVTGQEDVLKSKGFTIVDTLHVEDSSVKPLVSKNFNKKVVEKMGLVYLVQYSPDQFKSSNIAKKELRKELMDLGFKVRYISENYKMMAIEGTATLQAVHPNQNWHYNMIKAPEAWAITPGSSSVKVAVLDTGIDHNHPSLANFVNTNLGRSFVGGNTMDVQGHGTHVAGTIASYGSVSGVMQSATLIPVKVLDNSGSGSLYGITQGILYAADIDADVINMSLGGGGYNQSMDEAVQTAVAQGTIVVAATGNDGASSISYPAAYSSVIAVGSVTSNRTRSSFSNYGSGLEVMAPGSNIYSTYPNSRYTSLSGTSMATPHVAGVAGLIRAANPDISVAQARQILRDTAQEAGSFTQYGYGIVDAHAAVVAASGGSGG

SEQ ID NO: 1851 - DNA, 1239 bp, synthetic construct
  misc_feature 1..1239: note = Variant of serine peptidase from Bacillus sinesaloumensis
  source 1..1239: mol_type = other DNA
atggcagatcaagctagtcaagctaatggaaaccaggacgtcattgaaggcgagctgatcgtttcagtggaaccgaagaacggtaaacctgatgtgagcattcaaagtgcacaatccgtaacagggcaggaagacgtccttaaatcgaaaggctttacgatcgttgataccttgcatgtagaggatagcagcgtcaagccactcgtctcgaagaatttcaataagaaagtggtggagaagatgggactggtgtatcttgttcaatactctccggaccagtttaaaagttccaacattgcgaagaaagaactcagaaaagaattgatggatctgggctttaaagtccgctatataagcgaaaattacaagatgatggcgatcgaaggtacagccactcttcaggcagtacaccctaaccaaaactggcattataatatgattaaagctccggaagcgtgggctattacggttggatcctctagcgttaaagtagcagtcctggatacagggatcgaccataatcacccatccttggccaacttcgtgaatactaatcttggccggtcgtttgttggaggaaacaccatggatgttcaaggtcatggcacacatgttgctggcacgattgcatcttatgggagtgtaagcggagtgatgcagagtgcgacactgatcccggtcaaagtgctcgataattctggcagcgggtccctttacggtattacgcaaggcatattgtatgccgccgacatcgatgcggacgtcattaacatgtctctgggtggaggaggctataatcagagcatggatgaggctgttcaaacagcagttgctcagggaaccattgtagtagcagcgactggcaatgatggtgcatcgtcgatcagttatcctgctgcctacagcagcgtcattgcggtgggatctgtgacgtccaatcgtacacgatcctcgttttctaactatggatctgggcttgaagttatggcaccgggcagcaacatctacagtacgtatcctaattccagatatacatctttgagtggtacaagcatggctactccgcacgttgcgggcgtagctgggctcattcgcgcagccaacccagacatatctgtcgcgcaagcccgtcagattctgcgggataccgcgcaagaagcaggatcgttcacacagtacggctatggaatcgtcgatgctcatgccgccgttgttgctgcatccggtggtagcggcggc

SEQ ID NO: 1852 - protein, 413 aa, synthetic construct; identical to SEQ ID NO: 632
  REGION 1..413: note = Variant of serine peptidase from Bacillus sinesaloumensis

SEQ ID NO: 1853 - DNA, 1239 bp, synthetic construct
  misc_feature 1..1239: note = Variant of serine peptidase from Bacillus sinesaloumensis
  source 1..1239: mol_type = other DNA
atggcagatcaagctagtcaagctaatggaaaccaggacgtcattgaaggcgagctgatcgtttcagtggaaccgaagaacggtaaacctgatgtgagcattcaaagtgcacaatccgtaacagggcaggaagacgtccttaaatcgaaaggctttacgatcgttgataccttgcatgtagaggatagcagcgtcaagccactcgtctcgaagaatttcaataagaaagtggtggagaagatgggactggtgtatcttgttcaatactctccggaccagtttaaaagttccaacattgcgaagaaagaactcagaaaagaattgatggatctgggctttaaagtccgctatataagcgaaaattacaagatgatggcgatcgaaggtacagccactcttcaggcagtacaccctaaccaaaactggcattataatatgattaaagctccggaagcgtgggctattacgactggatcctctagcgttaaagtagcagtcctggatacagggatcgaccataatcacccatccttggccaacttcgtgaatactaatcttggccggtcgtttgttggaggaaacaccatggatgttcaaggtcatggcacacatgttgctggcacgattgcatcttatgggagtgtaagcggagtgatgcagagtgcgacactgatcccggtcaaagtgctcgataattctggcagcgggtccctttacggtattacgcaaggcatattgtatgccgccgacatcgatgcggacgtcattaacatgtctctgggtggaggaggctataatcagagcatggatgaggctgttcaaacagcagttgctcagggaaccattgtagtagcagcgactggcaatgatggtgcatcgtcgatcagttatcctgctgcctacagcagcgtcattgcggtgggatctgtgacgtccaatcgtacacgatcctcgttttctaactatggatctgggcttgaagttatggcaccgggcagcaacatctacagtacgtatcctaattccagatatacatctttgagtggtacaagcatggctactccgcacgttgcgggcgtagctgggctcattcgcgcagccaacccagacatatctgtcgcgcaagcccgtcagattctgcgggataccgcgcaagaagcaggatcgttcacacagtacggctatggaatcgtcgatgctcatgccgccgttgttgctgcatccggtggtagcggcggc

SEQ ID NO: 1854 - protein, 413 aa, synthetic construct; identical to SEQ ID NO: 684
  REGION 1..413: note = Variant of serine peptidase from Bacillus sinesaloumensis

SEQ ID NO: 1855 - DNA, 1239 bp, synthetic construct
  misc_feature 1..1239: note = Variant of serine peptidase from Bacillus sinesaloumensis
  source 1..1239: mol_type = other DNA
atggcagatcaagctagtcaagctaatggaaaccaggacgtcattgaaggcgagctgatcgtttcagtggaaccgaagaacggtaaacctgatgtgagcattcaaagtgcacaatccgtaacagggcaggaagacgtccttaaatcgaaaggctttacgatcgttgataccttgcatgtagaggatagcagcgtcaagccactcgtctcgaagaatttcaataagaaagtggtggagaagatgggactggtgtatcttgttcaatactctccggaccagtttaaaagttccaacattgcgaagaaagaactcagaaaagaattgatggatctgggctttaaagtccgctatataagcgaaaattacaagatgatggcgatcgaaggtacagccactcttcaggcagtacaccctaaccaaaactggcattataatatgattaaagctccggaagcgtgggctattacgaatggatcctctagcgttaaagtagcagtcctggatacagggatcgaccataatcacccatccttggccaacttcgtgaatactaatcttggccggtcgtttgttggaggaaacaccatggatgttcaaggtcatggcacacatgttgctggcacgattgcatcttatgggagtgtaagcggagtgatgcagagtgcgacactgatcccggtcaaagtgctcgataattctggcagcgggtccctttacggtattacgcaaggcatattgtatgccgccgacatcgatgcggacgtcattaacatgtctctgggtggaggaggctataatcagagcatggatgaggctgttcaaacagcagttgctcagggaaccattgtagtagcagcgactggcaatgatggtgcatcgtcgatcagttatcctgctgcctacagcagcgtcattgcggtgggatctgtgacgtccaatcgtacacgatcctcgttttctaactatggatctgggcttgaagttatggcaccgggcagcaacatctacagtacgtatcctaattccagatatacatctttgagtggtacaagcatggctactccgcacgttgcgggcgtagctgggctcattcgcgcagccaacccagacatatctgtcgcgcaagcccgtcagattctgcgggataccgcgcaagaagcaggatcgttcacacagtacggctatggaatcgtcgatgctcatgccgccgttgttgctgcatccggtggtagcggcggc

SEQ ID NO: 1856 - protein, 413 aa, synthetic construct
  REGION 1..413: note = Variant of serine peptidase from Bacillus sinesaloumensis
MADQASQANGNQDVIEGELIVSVEPKNGKPDVSIQSAQSVTGQEDVLKSKGFTIVDTLHVEDSSVKPLVSKNFNKKVVEKMGLVYLVQYSPDQFKSSNIAKKELRKELMDLGFKVRYISENYKMMAIEGTATLQAVHPNQNWHYNMIKAPEAWAITNGSSSVKVAVLDTGIDHNHPSLANFVNTNLGRSFVGGNTMDVQGHGTHVAGTIASYGSVSGVMQSATLIPVKVLDNSGSGSLYGITQGILYAADIDADVINMSLGGGGYNQSMDEAVQTAVAQGTIVVAATGNDGASSISYPAAYSSVIAVGSVTSNRTRSSFSNYGSGLEVMAPGSNIYSTYPNSRYTSLSGTSMATPHVAGVAGLIRAANPDISVAQARQILRDTAQEAGSFTQYGYGIVDAHAAVVAASGGSGG

SEQ ID NO: 1857 - DNA, 1239 bp, synthetic construct
  misc_feature 1..1239: note = Variant of serine peptidase from Bacillus sinesaloumensis
  source 1..1239: mol_type = other DNA
atggcagatcaagctagtcaagctaatggaaaccaggacgtcattgaaggcgagctgatcgtttcagtggaaccgaagaacggtaaacctgatgtgagcattcaaagtgcacaatccgtaacagggcaggaagacgtccttaaatcgaaaggctttacgatcgttgataccttgcatgtagaggatagcagcgtcaagccactcgtctcgaagaatttcaataagaaagtggtggagaagatgggactggtgtatcttgttcaatactctccggaccagtttaaaagttccaacattgcgaagaaagaactcagaaaagaattgatggatctgggctttaaagtccgctatataagcgaaaattacaagatgatggcgatcgaaggtacagccactcttcaggcagtacaccctaaccaaaactggcattataatatgattaaagctccggaagcgtgggctattacgcggggatcctctagcgttaaagtagcagtcctggatacagggatcgaccataatcacccatccttggccaacttcgtgaatactaatcttggccggtcgtttgttggaggaaacaccatggatgttcaaggtcatggcacacatgttgctggcacgattgcatcttatgggagtgtaagcggagtgatgcagagtgcgacactgatcccggtcaaagtgctcgataattctggcagcgggtccctttacggtattacgcaaggcatattgtatgccgccgacatcgatgcggacgtcattaacatgtctctgggtggaggaggctataatcagagcatggatgaggctgttcaaacagcagttgctcagggaaccattgtagtagcagcgactggcaatgatggtgcatcgtcgatcagttatcctgctgcctacagcagcgtcattgcggtgggatctgtgacgtccaatcgtacacgatcctcgttttctaactatggatctgggcttgaagttatggcaccgggcagcaacatctacagtacgtatcctaattccagatatacatctttgagtggtacaagcatggctactccgcacgttgcgggcgtagctgggctcattcgcgcagccaacccagacatatctgtcgcgcaagcccgtcagattctgcgggataccgcgcaagaagcaggatcgttcacacagtacggctatggaatcgtcgatgctcatgccgccgttgttgctgcatccggtggtagcggcggc

SEQ ID NO: 1858 - protein, 413 aa, synthetic construct; identical to SEQ ID NO: 662
  REGION 1..413: note = Variant of serine peptidase from Bacillus sinesaloumensis

SEQ ID NO: 1859 - DNA, 1239 bp, synthetic construct; identical to SEQ ID NO: 871
  misc_feature 1..1239: note = Variant of serine peptidase from Bacillus sinesaloumensis
  source 1..1239: mol_type = other DNA

SEQ ID NO: 1860 - protein, 413 aa, synthetic construct; identical to SEQ ID NO: 872
  REGION 1..413: note = Variant of serine peptidase from Bacillus sinesaloumensis

SEQ ID NO: 1861 - DNA, 1239 bp, synthetic construct
  misc_feature 1..1239: note = Variant of serine peptidase from Bacillus sinesaloumensis
  source 1..1239: mol_type = other DNA
atggcagatcaagctagtcaagctaatggaaaccaggacgtcattgaaggcgagctgatcgtttcagtggaaccgaagaacggtaaacctgatgtgagcattcaaagtgcacaatccgtaacagggcaggaagacgtccttaaatcgaaaggctttacgatcgttgataccttgcatgtagaggatagcagcgtcaagccactcgtctcgaagaatttcaataagaaagtggtggagaagatgggactggtgtatcttgttcaatactctccggaccagtttaaaagttccaacattgcgaagaaagaactcagaaaagaattgatggatctgggctttaaagtccgctatataagcgaaaattacaagatgatggcgatcgaaggtacagccactcttcaggcagtacaccctaaccaaaactggcattataatatgattaaagctccggaagcgtgggctattacgctgggatcctctagcgttaaagtagcagtcctggatacagggatcgaccataatcacccatccttggccaacttcgtgaatactaatcttggccggtcgtttgttggaggaaacaccatggatgttcaaggtcatggcacacatgttgctggcacgattgcatcttatgggagtgtaagcggagtgatgcagagtgcgacactgatcccggtcaaagtgctcgataattctggcagcgggtccctttacggtattacgcaaggcatattgtatgccgccgacatcgatgcggacgtcattaacatgtctctgggtggaggaggctataatcagagcatggatgaggctgttcaaacagcagttgctcagggaaccattgtagtagcagcgactggcaatgatggtgcatcgtcgatcagttatcctgctgcctacagcagcgtcattgcggtgggatctgtgacgtccaatcgtacacgatcctcgttttctaactatggatctgggcttgaagttatggcaccgggcagcaacatctacagtacgtatcctaattccagatatacatctttgagtggtacaagcatggctactccgcacgttgcgggcgtagctgggctcattcgcgcagccaacccagacatatctgtcgcgcaagcccgtcagattctgcgggataccgcgcaagaagcaggatcgttcacacagtacggctatggaatcgtcgatgctcatgccgccgttgttgctgcatccggtggtagcggcggc

SEQ ID NO: 1862 - protein, 413 aa, synthetic construct
  REGION 1..413: note = Variant of serine peptidase from Bacillus sinesaloumensis
MADQASQANGNQDVIEGELIVSVEPKNGKPDVSIQSAQSVTGQEDVLKSKGFTIVDTLHVEDSSVKPLVSKNFNKKVVEKMGLVYLVQYSPDQFKSSNIAKKELRKELMDLGFKVRYISENYKMMAIEGTATLQAVHPNQNWHYNMIKAPEAWAITLGSSSVKVAVLDTGIDHNHPSLANFVNTNLGRSFVGGNTMDVQGHGTHVAGTIASYGSVSGVMQSATLIPVKVLDNSGSGSLYGITQGILYAADIDADVINMSLGGGGYNQSMDEAVQTAVAQGTIVVAATGNDGASSISYPAAYSSVIAVGSVTSNRTRSSFSNYGSGLEVMAPGSNIYSTYPNSRYTSLSGTSMATPHVAGVAGLIRAANPDISVAQARQILRDTAQEAGSFTQYGYGIVDAHAAVVAASGGSGG

SEQ ID NO: 1863 - DNA, 1239 bp, synthetic construct
  misc_feature 1..1239: note = Variant of serine peptidase from Bacillus sinesaloumensis
  source 1..1239: mol_type = other DNA
atggcagatcaagctagtcaagctaatggaaaccaggacgtcattgaaggcgagctgatcgtttcagtggaaccgaagaacggtaaacctgatgtgagcattcaaagtgcacaatccgtaacagggcaggaagacgtccttaaatcgaaaggctttacgatcgttgataccttgcatgtagaggatagcagcgtcaagccactcgtctcgaagaatttcaataagaaagtggtggagaagatgggactggtgtatcttgttcaatactctccggaccagtttaaaagttccaacattgcgaagaaagaactcagaaaagaattgatggatctgggctttaaagtccgctatataagcgaaaattacaagatgatggcgatcgaaggtacagccactcttcaggcagtacaccctaaccaaaactggcattataatatgattaaagctccggaagcgtgggctattacgtggggatcctctagcgttaaagtagcagtcctggatacagggatcgaccataatcacccatccttggccaacttcgtgaatactaatcttggccggtcgtttgttggaggaaacaccatggatgttcaaggtcatggcacacatgttgctggcacgattgcatcttatgggagtgtaagcggagtgatgcagagtgcgacactgatcccggtcaaagtgctcgataattctggcagcgggtccctttacggtattacgcaaggcatattgtatgccgccgacatcgatgcggacgtcattaacatgtctctgggtggaggaggctataatcagagcatggatgaggctgttcaaacagcagttgctcagggaaccattgtagtagcagcgactggcaatgatggtgcatcgtcgatcagttatcctgctgcctacagcagcgtcattgcggtgggatctgtgacgtccaatcgtacacgatcctcgttttctaactatggatctgggcttgaagttatggcaccgggcagcaacatctacagtacgtatcctaattccagatatacatctttgagtggtacaagcatggctactccgcacgttgcgggcgtagctgggctcattcgcgcagccaacccagacatatctgtcgcgcaagcccgtcagattctgcgggataccgcgcaagaagcaggatcgttcacacagtacggctatggaatcgtcgatgctcatgccgccgttgttgctgcatccggtggtagcggcggc

SEQ ID NO: 1864 - protein, 413 aa, synthetic construct
  REGION 1..413: note = Variant of serine peptidase from Bacillus sinesaloumensis
MADQASQANGNQDVIEGELIVSVEPKNGKPDVSIQSAQSVTGQEDVLKSKGFTIVDTLHVEDSSVKPLVSKNFNKKVVEKMGLVYLVQYSPDQFKSSNIAKKELRKELMDLGFKVRYISENYKMMAIEGTATLQAVHPNQNWHYNMIKAPEAWAITWGSSSVKVAVLDTGIDHNHPSLANFVNTNLGRSFVGGNTMDVQGHGTHVAGTIASYGSVSGVMQSATLIPVKVLDNSGSGSLYGITQGILYAADIDADVINMSLGGGGYNQSMDEAVQTAVAQGTIVVAATGNDGASSISYPAAYSSVIAVGSVTSNRTRSSFSNYGSGLEVMAPGSNIYSTYPNSRYTSLSGTSMATPHVAGVAGLIRAANPDISVAQARQILRDTAQEAGSFTQYGYGIVDAHAAVVAASGGSGG

SEQ ID NO: 1865 - DNA, 1239 bp, synthetic construct
  misc_feature 1..1239: note = Variant of serine peptidase from Bacillus sinesaloumensis
  source 1..1239: mol_type = other DNA
atggcagatcaagctagtcaagctaatggaaaccaggacgtcattgaaggcgagctgatcgtttcagtggaaccgaagaacggtaaacctgatgtgagcattcaaagtgcacaatccgtaacagggcaggaagacgtccttaaatcgaaaggctttacgatcgttgataccttgcatgtagaggatagcagcgtcaagccactcgtctcgaagaatttcaataagaaagtggtggagaagatgggactggtgtatcttgttcaatactctccggaccagtttaaaagttccaacattgcgaagaaagaactcagaaaagaattgatggatctgggctttaaagtccgctatataagcgaaaattacaagatgatggcgatcgaaggtacagccactcttcaggcagtacaccctaaccaaaactggcattataatatgattaaagctccggaagcgtgggctattacgaagggatcctctagcgttaaagtagcagtcctggatacagggatcgaccataatcacccatccttggccaacttcgtgaatactaatcttggccggtcgtttgttggaggaaacaccatggatgttcaaggtcatggcacacatgttgctggcacgattgcatcttatgggagtgtaagcggagtgatgcagagtgcgacactgatcccggtcaaagtgctcgataattctggcagcgggtccctttacggtattacgcaaggcatattgtatgccgccgacatcgatgcggacgtcattaacatgtctctgggtggaggaggctataatcagagcatggatgaggctgttcaaacagcagttgctcagggaaccattgtagtagcagcgactggcaatgatggtgcatcgtcgatcagttatcctgctgcctacagcagcgtcattgcggtgggatctgtgacgtccaatcgtacacgatcctcgttttctaactatggatctgggcttgaagttatggcaccgggcagcaacatctacagtacgtatcctaattccagatatacatctttgagtggtacaagcatggctactccgcacgttgcgggcgtagctgggctcattcgcgcagccaacccagacatatctgtcgcgcaagcccgtcagattctgcgggataccgcgcaagaagcaggatcgttcacacagtacggctatggaatcgtcgatgctcatgccgccgttgttgctgcatccggtggtagcggcggc

SEQ ID NO: 1866 - protein, 413 aa, synthetic construct
  REGION 1..413: note = Variant of serine peptidase from Bacillus sinesaloumensis
MADQASQANGNQDVIEGELIVSVEPKNGKPDVSIQSAQSVTGQEDVLKSKGFTIVDTLHVEDSSVKPLVSKNFNKKVVEKMGLVYLVQYSPDQFKSSNIAKKELRKELMDLGFKVRYISENYKMMAIEGTATLQAVHPNQNWHYNMIKAPEAWAITKGSSSVKVAVLDTGIDHNHPSLANFVNTNLGRSFVGGNTMDVQGHGTHVAGTIASYGSVSGVMQSATLIPVKVLDNSGSGSLYGITQGILYAADIDADVINMSLGGGGYNQSMDEAVQTAVAQGTIVVAATGNDGASSISYPAAYSSVIAVGSVTSNRTRSSFSNYGSGLEVMAPGSNIYSTYPNSRYTSLSGTSMATPHVAGVAGLIRAANPDISVAQARQILRDTAQEAGSFTQYGYGIVDAHAAVVAASGGSGG

SEQ ID NO: 1867 - DNA, 1239 bp, synthetic construct
  misc_feature 1..1239: note = Variant of serine peptidase from Bacillus sinesaloumensis
  source 1..1239: mol_type = other DNA
atggcagatcaagctagtcaagctaatggaaaccaggacgtcattgaaggcgagctgatcgtttcagtggaaccgaagaacggtaaacctgatgtgagcattcaaagtgcacaatccgtaacagggcaggaagacgtccttaaatcgaaaggctttacgatcgttgataccttgcatgtagaggatagcagcgtcaagccactcgtctcgaagaatttcaataagaaagtggtggagaagatgggactggtgtatcttgttcaatactctccggaccagtttaaaagttccaacattgcgaagaaagaactcagaaaagaattgatggatctgggctttaaagtccgctatataagcgaaaattacaagatgatggcgatcgaaggtacagccactcttcaggcagtacaccctaaccaaaactggcattataatatgattaaagctccggaagcgtgggctattacgtgtggatcctctagcgttaaagtagcagtcctggatacagggatcgaccataatcacccatccttggccaacttcgtgaatactaatcttggccggtcgtttgttggaggaaacaccatggatgttcaaggtcatggcacacatgttgctggcacgattgcatcttatgggagtgtaagcggagtgatgcagagtgcgacactgatcccggtcaaagtgctcgataattctggcagcgggtccctttacggtattacgcaaggcatattgtatgccgccgacatcgatgcggacgtcattaacatgtctctgggtggaggaggctataatcagagcatggatgaggctgttcaaacagcagttgctcagggaaccattgtagtagcagcgactggcaatgatggtgcatcgtcgatcagttatcctgctgcctacagcagcgtcattgcggtgggatctgtgacgtccaatcgtacacgatcctcgttttctaactatggatctgggcttgaagttatggcaccgggcagcaacatctacagtacgtatcctaattccagatatacatctttgagtggtacaagcatggctactccgcacgttgcgggcgtagctgggctcattcgcgcagccaacccagacatatctgtcgcgcaagcccgtcagattctgcgggataccgcgcaagaagcaggatcgttcacacagtacggctatggaatcgtcgatgctcatgccgccgttgttgctgcatccggtggtagcggcggc

SEQ ID NO: 1868 - protein, 413 aa, synthetic construct
  REGION 1..413: note = Variant of serine peptidase from Bacillus sinesaloumensis
MADQASQANGNQDVIEGELIVSVEPKNGKPDVSIQSAQSVTGQEDVLKSKGFTIVDTLHVEDSSVKPLVSKNFNKKVVEKMGLVYLVQYSPDQFKSSNIAKKELRKELMDLGFKVRYISENYKMMAIEGTATLQAVHPNQNWHYNMIKAPEAWAITCGSSSVKVAVLDTGIDHNHPSLANFVNTNLGRSFVGGNTMDVQGHGTHVAGTIASYGSVSGVMQSATLIPVKVLDNSGSGSLYGITQGILYAADIDADVINMSLGGGGYNQSMDEAVQTAVAQGTIVVAATGNDGASSISYPAAYSSVIAVGSVTSNRTRSSFSNYGSGLEVMAPGSNIYSTYPNSRYTSLSGTSMATPHVAGVAGLIRAANPDISVAQARQILRDTAQEAGSFTQYGYGIVDAHAAVVAASGGSGG

SEQ ID NO: 1869 - DNA, 1239 bp, synthetic construct
  misc_feature 1..1239: note = Variant of serine peptidase from Bacillus sinesaloumensis
  source 1..1239: mol_type = other DNA
atggcagatcaagctagtcaagctaatggaaaccaggacgtcattgaaggcgagctgatcgtttcagtggaaccgaagaacggtaaacctgatgtgagcattcaaagtgcacaatccgtaacagggcaggaagacgtccttaaatcgaaaggctttacgatcgttgataccttgcatgtagaggatagcagcgtcaagccactcgtctcgaagaatttcaataagaaagtggtggagaagatgggactggtgtatcttgttcaatactctccggaccagtttaaaagttccaacattgcgaagaaagaactcagaaaagaattgatggatctgggctttaaagtccgctatataagcgaaaattacaagatgatggcgatcgaaggtacagccactcttcaggcagtacaccctaaccaaaactggcattataatatgattaaagctccggaagcgtgggctattacggatggatcctctagcgttaaagtagcagtcctggatacagggatcgaccataatcacccatccttggccaacttcgtgaatactaatcttggccggtcgtttgttggaggaaacaccatggatgttcaaggtcatggcacacatgttgctggcacgattgcatcttatgggagtgtaagcggagtgatgcagagtgcgacactgatcccggtcaaagtgctcgataattctggcagcgggtccctttacggtattacgcaaggcatattgtatgccgccgacatcgatgcggacgtcattaacatgtctctgggtggaggaggctataatcagagcatggatgaggctgttcaaacagcagttgctcagggaaccattgtagtagcagcgactggcaatgatggtgcatcgtcgatcagttatcctgctgcctacagcagcgtcattgcggtgggatctgtgacgtccaatcgtacacgatcctcgttttctaactatggatctgggcttgaagttatggcaccgggcagcaacatctacagtacgtatcctaattccagatatacatctttgagtggtacaagcatggctactccgcacgttgcgggcgtagctgggctcattcgcgcagccaacccagacatatctgtcgcgcaagcccgtcagattctgcgggataccgcgcaagaagcaggatcgttcacacagtacggctatggaatcgtcgatgctcatgccgccgttgttgctgcatccggtggtagcggcggc

SEQ ID NO: 1870 - protein, 413 aa, synthetic construct
  REGION 1..413: note = Variant of serine peptidase from Bacillus sinesaloumensis
MADQASQANGNQDVIEGELIVSVEPKNGKPDVSIQSAQSVTGQEDVLKSKGFTIVDTLHVEDSSVKPLVSKNFNKKVVEKMGLVYLVQYSPDQFKSSNIAKKELRKELMDLGFKVRYISENYKMMAIEGTATLQAVHPNQNWHYNMIKAPEAWAITDGSSSVKVAVLDTGIDHNHPSLANFVNTNLGRSFVGGNTMDVQGHGTHVAGTIASYGSVSGVMQSATLIPVKVLDNSGSGSLYGITQGILYAADIDADVINMSLGGGGYNQSMDEAVQTAVAQGTIVVAATGNDGASSISYPAAYSSVIAVGSVTSNRTRSSFSNYGSGLEVMAPGSNIYSTYPNSRYTSLSGTSMATPHVAGVAGLIRAANPDISVAQARQILRDTAQEAGSFTQYGYGIVDAHAAVVAASGGSGG

SEQ ID NO: 1871 - DNA, 1239 bp, synthetic construct
  misc_feature 1..1239: note = Variant of serine peptidase from Bacillus sinesaloumensis
  source 1..1239: mol_type = other DNA
atggcagatcaagctagtcaagctaatggaaaccaggacgtcattgaaggcgagctgatcgtttcagtggaaccgaagaacggtaaacctgatgtgagcattcaaagtgcacaatccgtaacagggcaggaagacgtccttaaatcgaaaggctttacgatcgttgataccttgcatgtagaggatagcagcgtcaagccactcgtctcgaagaatttcaataagaaagtggtggagaagatgggactggtgtatcttgttcaatactctccggaccagtttaaaagttccaacattgcgaagaaagaactcagaaaagaattgatggatctgggctttaaagtccgctatataagcgaaaattacaagatgatggcgatcgaaggtacagccactcttcaggcagtacaccctaaccaaaactggcattataatatgattaaagctccggaagcgtgggctattacgcagggatcctctagcgttaaagtagcagtcctggatacagggatcgaccataatcacccatccttggccaacttcgtgaatactaatcttggccggtcgtttgttggaggaaacaccatggatgttcaaggtcatggcacacatgttgctggcacgattgcatcttatgggagtgtaagcggagtgatgcagagtgcgacactgatcccggtcaaagtgctcgataattctggcagcgggtccctttacggtattacgcaaggcatattgtatgccgccgacatcgatgcggacgtcattaacatgtctctgggtggaggaggctataatcagagcatggatgaggctgttcaaacagcagttgctcagggaaccattgtagtagcagcgactggcaatgatggtgcatcgtcgatcagttatcctgctgcctacagcagcgtcattgcggtgggatctgtgacgtccaatcgtacacgatcctcgttttctaactatggatctgggcttgaagttatggcaccgggcagcaacatctacagtacgtatcctaattccagatatacatctttgagtggtacaagcatggctactccgcacgttgcgggcgtagctgggctcattcgcgcagccaacccagacatatctgtcgcgcaagcccgtcagattctgcgggataccgcgcaagaagcaggatcgttcacacagtacggctatggaatcgtcgatgctcatgccgccgttgttgctgcatccggtggtagcggcggc

SEQ ID NO: 1872 - protein, 413 aa, synthetic construct
  REGION 1..413: note = Variant of serine peptidase from Bacillus sinesaloumensis
MADQASQANGNQDVIEGELIVSVEPKNGKPDVSIQSAQSVTGQEDVLKSKGFTIVDTLHVEDSSVKPLVSKNFNKKVVEKMGLVYLVQYSPDQFKSSNIAKKELRKELMDLGFKVRYISENYKMMAIEGTATLQAVHPNQNWHYNMIKAPEAWAITQGSSSVKVAVLDTGIDHNHPSLANFVNTNLGRSFVGGNTMDVQGHGTHVAGTIASYGSVSGVMQSATLIPVKVLDNSGSGSLYGITQGILYAADIDADVINMSLGGGGYNQSMDEAVQTAVAQGTIVVAATGNDGASSISYPAAYSSVIAVGSVTSNRTRSSFSNYGSGLEVMAPGSNIYSTYPNSRYTSLSGTSMATPHVAGVAGLIRAANPDISVAQARQILRDTAQEAGSFTQYGYGIVDAHAAVVAASGGSGG

SEQ ID NO: 1873 - DNA, 1239 bp, synthetic construct
  misc_feature 1..1239: note = Variant of serine peptidase from Bacillus sinesaloumensis
  source 1..1239: mol_type = other DNA
atggcagatcaagctagtcaagctaatggaaaccaggacgtcattgaaggcgagctgatcgtttcagtggaaccgaagaacggtaaacctgatgtgagcattcaaagtgcacaatccgtaacagggcaggaagacgtccttaaatcgaaaggctttacgatcgttgataccttgcatgtagaggatagcagcgtcaagccactcgtctcgaagaatttcaataagaaagtggtggagaagatgggactggtgtatcttgttcaatactctccggaccagtttaaaagttccaacattgcgaagaaagaactcagaaaagaattgatggatctgggctttaaagtccgctatataagcgaaaattacaagatgatggcgatcgaaggtacagccactcttcaggcagtacaccctaaccaaaactggcattataatatgattaaagctccggaagcgtgggctattacgatgggatcctctagcgttaaagtagcagtcctggatacagggatcgaccataatcacccatccttggccaacttcgtgaatactaatcttggccggtcgtttgttggaggaaacaccatggatgttcaaggtcatggcacacatgttgctggcacgattgcatcttatgggagtgtaagcggagtgatgcagagtgcgacactgatcccggtcaaagtgctcgataattctggcagcgggtccctttacggtattacgcaaggcatattgtatgccgccgacatcgatgcggacgtcattaacatgtctctgggtggaggaggctataatcagagcatggatgaggctgttcaaacagcagttgctcagggaaccattgtagtagcagcgactggcaatgatggtgcatcgtcgatcagttatcctgctgcctacagcagcgtcattgcggtgggatctgtgacgtccaatcgtacacgatcctcgttttctaactatggatctgggcttgaagttatggcaccgggcagcaacatctacagtacgtatcctaattccagatatacatctttgagtggtacaagcatggctactccgcacgttgcgggcgtagctgggctcattcgcgcagccaacccagacatatctgtcgcgcaagcccgtcagattctgcgggataccgcgcaagaagcaggatcgttcacacagtacggctatggaatcgtcgatgctcatgccgccgttgttgctgcatccggtggtagcggcggc

SEQ ID NO: 1874 - protein, 413 aa, synthetic construct
  REGION 1..413: note = Variant of serine peptidase from Bacillus sinesaloumensis
MADQASQANGNQDVIEGELIVSVEPKNGKPDVSIQSAQSVTGQEDVLKSKGFTIVDTLHVEDSSVKPLVSKNFNKKVVEKMGLVYLVQYSPDQFKSSNIAKKELRKELMDLGFKVRYISENYKMMAIEGTATLQAVHPNQNWHYNMIKAPEAWAITMGSSSVKVAVLDTGIDHNHPSLANFVNTNLGRSFVGGNTMDVQGHGTHVAGTIASYGSVSGVMQSATLIPVKVLDNSGSGSLYGITQGILYAADIDADVINMSLGGGGYNQSMDEAVQTAVAQGTIVVAATGNDGASSISYPAAYSSVIAVGSVTSNRTRSSFSNYGSGLEVMAPGSNIYSTYPNSRYTSLSGTSMATPHVAGVAGLIRAANPDISVAQARQILRDTAQEAGSFTQYGYGIVDAHAAVVAASGGSGG

SEQ ID NO: 1875 - DNA, 1239 bp, synthetic construct
  misc_feature 1..1239: note = Variant of serine peptidase from Bacillus sinesaloumensis
  source 1..1239: mol_type = other DNA
atggcagatcaagctagtcaagctaatggaaaccaggacgtcattgaaggcgagctgatcgtttcagtggaaccgaagaacggtaaacctgatgtgagcattcaaagtgcacaatccgtaacagggcaggaagacgtccttaaatcgaaaggctttacgatcgttgataccttgcatgtagaggatagcagcgtcaagccactcgtctcgaagaatttcaataagaaagtggtggagaagatgggactggtgtatcttgttcaatactctccggaccagtttaaaagttccaacattgcgaagaaagaactcagaaaagaattgatggatctgggctttaaagtccgctatataagcgaaaattacaagatgatggcgatcgaaggtacagccactcttcaggcagtacaccctaaccaaaactggcattataatatgattaaagctccggaagcgtgggctattacgcacggatcctctagcgttaaagtagcagtcctggatacagggatcgaccataatcacccatccttggccaacttcgtgaatactaatcttggccggtcgtttgttggaggaaacaccatggatgttcaaggtcatggcacacatgttgctggcacgattgcatcttatgggagtgtaagcggagtgatgcagagtgcgacactgatcccggtcaaagtgctcgataattctggcagcgggtccctttacggtattacgcaaggcatattgtatgccgccgacatcgatgcggacgtcattaacatgtctctgggtggaggaggctataatcagagcatggatgaggctgttcaaacagcagttgctcagggaaccattgtagtagcagcgactggcaatgatggtgcatcgtcgatcagttatcctgctgcctacagcagcgtcattgcggtgggatctgtgacgtccaatcgtacacgatcctcgttttctaactatggatctgggcttgaagttatggcaccgggcagcaacatctacagtacgtatcctaattccagatatacatctttgagtggtacaagcatggctactccgcacgttgcgggcgtagctgggctcattcgcgcagccaacccagacatatctgtcgcgcaagcccgtcagattctgcgggataccgcgcaagaagcaggatcgttcacacagtacggctatggaatcgtcgatgctcatgccgccgttgttgctgcatccggtggtagcggcggc

SEQ ID NO: 1876 - protein, 413 aa, synthetic construct
  REGION 1..413: note = Variant of serine peptidase from Bacillus sinesaloumensis
MADQASQANGNQDVIEGELIVSVEPKNGKPDVSIQSAQSVTGQEDVLKSKGFTIVDTLHVEDSSVKPLVSKNFNKKVVEKMGLVYLVQYSPDQFKSSNIAKKELRKELMDLGFKVRYISENYKMMAIEGTATLQAVHPNQNWHYNMIKAPEAWAITHGSSSVKVAVLDTGIDHNHPSLANFVNTNLGRSFVGGNTMDVQGHGTHVAGTIASYGSVSGVMQSATLIPVKVLDNSGSGSLYGITQGILYAADIDADVINMSLGGGGYNQSMDEAVQTAVAQGTIVVAATGNDGASSISYPAAYSSVIAVGSVTSNRTRSSFSNYGSGLEVMAPGSNIYSTYPNSRYTSLSGTSMATPHVAGVAGLIRAANPDISVAQARQILRDTAQEAGSFTQYGYGIVDAHAAVVAASGGSGG

SEQ ID NO: 1877 - DNA, 1239 bp, synthetic construct; identical to SEQ ID NO: 679
  misc_feature 1..1239: note = Variant of serine peptidase from Bacillus sinesaloumensis
  source 1..1239: mol_type = other DNA

SEQ ID NO: 1878 - protein, 413 aa, synthetic construct; identical to SEQ ID NO: 680
  REGION 1..413: note = Variant of serine peptidase from Bacillus sinesaloumensis

SEQ ID NO: 1879 - DNA, 1239 bp, synthetic construct
  misc_feature 1..1239: note = Variant of serine peptidase from Bacillus sinesaloumensis
  source 1..1239: mol_type = other DNA
atggcagatcaagctagtcaagctaatggaaaccaggacgtcattgaaggcgagctgatcgtttcagtggaaccgaagaacggtaaacctgatgtgagcattcaaagtgcacaatccgtaacagggcaggaagacgtccttaaatcgaaaggctttacgatcgttgataccttgcatgtagaggatagcagcgtcaagccactcgtctcgaagaatttcaataagaaagtggtggagaagatgggactggtgtatcttgttcaatactctccggaccagtttaaaagttccaacattgcgaagaaagaactcagaaaagaattgatggatctgggctttaaagtccgctatataagcgaaaattacaagatgatggcgatcgaaggtacagccactcttcaggcagtacaccctaaccaaaactggcattataatatgattaaagctccggaagcgtgggctattacgtttggatcctctagcgttaaagtagcagtcctggatacagggatcgaccataatcacccatccttggccaacttcgtgaatactaatcttggccggtcgtttgttggaggaaacaccatggatgttcaaggtcatggcacacatgttgctggcacgattgcatcttatgggagtgtaagcggagtgatgcagagtgcgacactgatcccggtcaaagtgctcgataattctggcagcgggtccctttacggtattacgcaaggcatattgtatgccgccgacatcgatgcggacgtcattaacatgtctctgggtggaggaggctataatcagagcatggatgaggctgttcaaacagcagttgctcagggaaccattgtagtagcagcgactggcaatgatggtgcatcgtcgatcagttatcctgctgcctacagcagcgtcattgcggtgggatctgtgacgtccaatcgtacacgatcctcgttttctaactatggatctgggcttgaagttatggcaccgggcagcaacatctacagtacgtatcctaattccagatatacatctttgagtggtacaagcatggctactccgcacgttgcgggcgtagctgggctcattcgcgcagccaacccagacatatctgtcgcgcaagcccgtcagattctgcgggataccgcgcaagaagcaggatcgttcacacagtacggctatggaatcgtcgatgctcatgccgccgttgttgctgcatccggtggtagcggcggc

SEQ ID NO: 1880 - protein, 413 aa, synthetic construct
  REGION 1..413: note = Variant of serine peptidase from Bacillus sinesaloumensis
MADQASQANGNQDVIEGELIVSVEPKNGKPDVSIQSAQSVTGQEDVLKSKGFTIVDTLHVEDSSVKPLVSKNFNKKVVEKMGLVYLVQYSPDQFKSSNIAKKELRKELMDLGFKVRYISENYKMMAIEGTATLQAVHPNQNWHYNMIKAPEAWAITFGSSSVKVAVLDTGIDHNHPSLANFVNTNLGRSFVGGNTMDVQGHGTHVAGTIASYGSVSGVMQSATLIPVKVLDNSGSGSLYGITQGILYAADIDADVINMSLGGGGYNQSMDEAVQTAVAQGTIVVAATGNDGASSISYPAAYSSVIAVGSVTSNRTRSSFSNYGSGLEVMAPGSNIYSTYPNSRYTSLSGTSMATPHVAGVAGLIRAANPDISVAQARQILRDTAQEAGSFTQYGYGIVDAHAAVVAASGGSGG

SEQ ID NO: 1881 - DNA, 1239 bp, synthetic construct
  misc_feature 1..1239: note = Variant of serine peptidase from Bacillus sinesaloumensis
  source 1..1239: mol_type = other DNA
atggcagatcaagctagtcaagctaatggaaaccaggacgtcattgaaggcgagctgatcgtttcagtggaaccgaagaacggtaaacctgatgtgagcattcaaagtgcacaatccgtaacagggcaggaagacgtccttaaatcgaaaggctttacgatcgttgataccttgcatgtagaggatagcagcgtcaagccactcgtctcgaagaatttcaataagaaagtggtggagaagatgggactggtgtatcttgttcaatactctccggaccagtttaaaagttccaacattgcgaagaaagaactcagaaaagaattgatggatctgggctttaaagtccgctatataagcgaaaattacaagatgatggcgatcgaaggtacagccactcttcaggcagtacaccctaaccaaaactggcattataatatgattaaagctccggaagcgtgggctattacgtctggatcccggagcgttaaagtagcagtcctggatacagggatcgaccataatcacccatccttggccaacttcgtgaatactaatcttggccggtcgtttgttggaggaaacaccatggatgttcaaggtcatggcacacatgttgctggcacgattgcatcttatgggagtgtaagcggagtgatgcagagtgcgacactgatcccggtcaaagtgctcgataattctggcagcgggtccctttacggtattacgcaaggcatattgtatgccgccgacatcgatgcggacgtcattaacatgtctctgggtggaggaggctataatcagagcatggatgaggctgttcaaacagcagttgctcagggaaccattgtagtagcagcgactggcaatgatggtgcatcgtcgatcagttatcctgctgcctacagcagcgtcattgcggtgggatctgtgacgtccaatcgtacacgatcctcgttttctaactatggatctgggcttgaagttatggcaccgggcagcaacatctacagtacgtatcctaattccagatatacatctttgagtggtacaagcatggctactccgcacgttgcgggcgtagctgggctcattcgcgcagccaacccagacatatctgtcgcgcaagcccgtcagattctgcgggataccgcgcaagaagcaggatcgttcacacagtacggctatggaatcgtcgatgctcatgccgccgttgttgctgcatccggtggtagcggcggc

SEQ ID NO: 1882 - protein, 413 aa, synthetic construct
  REGION 1..413: note = Variant of serine peptidase from Bacillus sinesaloumensis
MADQASQANGNQDVIEGELIVSVEPKNGKPDVSIQSAQSVTGQEDVLKSKGFTIVDTLHVEDSSVKPLVSKNFNKKVVEKMGLVYLVQYSPDQFKSSNIAKKELRKELMDLGFKVRYISENYKMMAIEGTATLQAVHPNQNWHYNMIKAPEAWAITSGSRSVKVAVLDTGIDHNHPSLANFVNTNLGRSFVGGNTMDVQGHGTHVAGTIASYGSVSGVMQSATLIPVKVLDNSGSGSLYGITQGILYAADIDADVINMSLGGGGYNQSMDEAVQTAVAQGTIVVAATGNDGASSISYPAAYSSVIAVGSVTSNRTRSSFSNYGSGLEVMAPGSNIYSTYPNSRYTSLSGTSMATPHVAGVAGLIRAANPDISVAQARQILRDTAQEAGSFTQYGYGIVDAHAAVVAASGGSGG

SEQ ID NO: 1883 - DNA, 1239 bp, synthetic construct
  misc_feature 1..1239: note = Variant of serine peptidase from Bacillus sinesaloumensis
  source 1..1239: mol_type = other DNA
atggcagatcaagctagtcaagctaatggaaaccaggacgtcattgaaggcgagctgatcgtttcagtggaaccgaagaacggtaaacctgatgtgagcattcaaagtgcacaatccgtaacagggcaggaagacgtccttaaatcgaaaggctttacgatcgttgataccttgcatgtagaggatagcagcgtcaagccactcgtctcgaagaatttcaataagaaagtggtggagaagatgggactggtgtatcttgttcaatactctccggaccagtttaaaagttccaacattgcgaagaaagaactcagaaaagaattgatggatctgggctttaaagtccgctatataagcgaaaattacaagatgatggcgatcgaaggtacagccactcttcaggcagtacaccctaaccaaaactggcattataatatgattaaagctccggaagcgtgggctattacgtctggatccgtgagcgttaaagtagcagtcctggatacagggatcgaccataatcacccatccttggccaacttcgtgaatactaatcttggccggtcgtttgttggaggaaacaccatggatgttcaaggtcatggcacacatgttgctggcacgattgcatcttatgggagtgtaagcggagtgatgcagagtgcgacactgatcccggtcaaagtgctcgataattctggcagcgggtccctttacggtattacgcaaggcatattgtatgccgccgacatcgatgcggacgtcattaacatgtctctgggtggaggaggctataatcagagcatggatgaggctgttcaaacagcagttgctcagggaaccattgtagtagcagcgactggcaatgatggtgcatcgtcgatcagttatcctgctgcctacagcagcgtcattgcggtgggatctgtgacgtccaatcgtacacgatcctcgttttctaactatggatctgggcttgaagttatggcaccgggcagcaacatctacagtacgtatcctaattccagatatacatctttgagtggtacaagcatggctactccgcacgttgcgggcgtagctgggctcattcgcgcagccaacccagacatatctgtcgcgcaagcccgtcagattctgcgggataccgcgcaagaagcaggatcgttcacacagtacggctatggaatcgtcgatgctcatgccgccgttgttgctgcatccggtggtagcggcggc

SEQ ID NO: 1884 - protein, 413 aa, synthetic construct
  REGION 1..413: note = Variant of serine peptidase from Bacillus sinesaloumensis
MADQASQANGNQDVIEGELIVSVEPKNGKPDVSIQSAQSVTGQEDVLKSKGFTIVDTLHVEDSSVKPLVSKNFNKKVVEKMGLVYLVQYSPDQFKSSNIAKKELRKELMDLGFKVRYISENYKMMAIEGTATLQAVHPNQNWHYNMIKAPEAWAITSGSVSVKVAVLDTGIDHNHPSLANFVNTNLGRSFVGGNTMDVQGHGTHVAGTIASYGSVSGVMQSATLIPVKVLDNSGSGSLYGITQGILYAADIDADVINMSLGGGGYNQSMDEAVQTAVAQGTIVVAATGNDGASSISYPAAYSSVIAVGSVTSNRTRSSFSNYGSGLEVMAPGSNIYSTYPNSRYTSLSGTSMATPHVAGVAGLIRAANPDISVAQARQILRDTAQEAGSFTQYGYGIVDAHAAVVAASGGSGG

SEQ ID NO: 1885 - DNA, 1239 bp, synthetic construct; identical to SEQ ID NO: 329
  misc_feature 1..1239: note = Variant of serine peptidase from Bacillus sinesaloumensis
  source 1..1239: mol_type = other DNA

SEQ ID NO: 1886 - protein, 413 aa, synthetic construct; identical to SEQ ID NO: 330
  REGION 1..413: note = Variant of serine peptidase from Bacillus sinesaloumensis

SEQ ID NO: 1887 - DNA, 1239 bp, synthetic construct; identical to SEQ ID NO: 319
  misc_feature 1..1239: note = Variant of serine peptidase from Bacillus sinesaloumensis
  source 1..1239: mol_type = other DNA

SEQ ID NO: 1888 - protein, 413 aa, synthetic construct; identical to SEQ ID NO: 320
  REGION 1..413: note = Variant of serine peptidase from Bacillus sinesaloumensis

SEQ ID NO: 1889 - DNA, 1239 bp, synthetic construct
  misc_feature 1..1239: note = Variant of serine peptidase from Bacillus sinesaloumensis
  source 1..1239: mol_type = other DNA
atggcagatcaagctagtcaagctaatggaaaccaggacgtcattgaaggcgagctgatcgtttcagtggaaccgaagaacggtaaacctgatgtgagcattcaaagtgcacaatccgtaacagggcaggaagacgtccttaaatcgaaaggctttacgatcgttgataccttgcatgtagaggatagcagcgtcaagccactcgtctcgaagaatttcaataagaaagtggtggagaagatgggactggtgtatcttgttcaatactctccggaccagtttaaaagttccaacattgcgaagaaagaactcagaaaagaattgatggatctgggctttaaagtccgctatataagcgaaaattacaagatgatggcgatcgaaggtacagccactcttcaggcagtacaccctaaccaaaactggcattataatatgattaaagctccggaagcgtgggctattacgtctggatccgctagcgttaaagtagcagtcctggatacagggatcgaccataatcacccatccttggccaacttcgtgaatactaatcttggccggtcgtttgttggaggaaacaccatggatgttcaaggtcatggcacacatgttgctggcacgattgcatcttatgggagtgtaagcggagtgatgcagagtgcgacactgatcccggtcaaagtgctcgataattctggcagcgggtccctttacggtattacgcaaggcatattgtatgccgccgacatcgatgcggacgtcattaacatgtctctgggtggaggaggctataatcagagcatggatgaggctgttcaaacagcagttgctcagggaaccattgtagtagcagcgactggcaatgatggtgcatcgtcgatcagttatcctgctgcctacagcagcgtcattgcggtgggatctgtgacgtccaatcgtacacgatcctcgttttctaactatggatctgggcttgaagttatggcaccgggcagcaacatctacagtacgtatcctaattccagatatacatctttgagtggtacaagcatggctactccgcacgttgcgggcgtagctgggctcattcgcgcagccaacccagacatatctgtcgcgcaagcccgtcagattctgcgggataccgcgcaagaagcaggatcgttcacacagtacggctatggaatcgtcgatgctcatgccgccgttgttgctgcatccggtggtagcggcggc

SEQ ID NO: 1890 - protein, 413 aa, synthetic construct
  REGION 1..413: note = Variant of serine peptidase from Bacillus sinesaloumensis
MADQASQANGNQDVIEGELIVSVEPKNGKPDVSIQSAQSVTGQEDVLKSKGFTIVDTLHVEDSSVKPLVSKNFNKKVVEKMGLVYLVQYSPDQFKSSNIAKKELRKELMDLGFKVRYISENYKMMAIEGTATLQAVHPNQNWHYNMIKAPEAWAITSGSASVKVAVLDTGIDHNHPSLANFVNTNLGRSFVGGNTMDVQGHGTHVAGTIASYGSVSGVMQSATLIPVKVLDNSGSGSLYGITQGILYAADIDADVINMSLGGGGYNQSMDEAVQTAVAQGTIVVAATGNDGASSISYPAAYSSVIAVGSVTSNRTRSSFSNYGSGLEVMAPGSNIYSTYPNSRYTSLSGTSMATPHVAGVAGLIRAANPDISVAQARQILRDTAQEAGSFTQYGYGIVDAHAAVVAASGGSGG

SEQ ID NO: 1891 - DNA, 1239 bp, synthetic construct; identical to SEQ ID NO: 165
  misc_feature 1..1239: note = Variant of serine peptidase from Bacillus sinesaloumensis
  source 1..1239: mol_type = other DNA

SEQ ID NO: 1892 - protein, 413 aa, synthetic construct; identical to SEQ ID NO: 166
  REGION 1..413: note = Variant of serine peptidase from Bacillus sinesaloumensis

SEQ ID NO: 1893 - DNA, 1239 bp, synthetic construct
  misc_feature 1..1239: note = Variant of serine peptidase from Bacillus sinesaloumensis
  source 1..1239: mol_type = other DNA
atggcagatcaagctagtcaagctaatggaaaccaggacgtcattgaaggcgagctgatcgtttcagtggaaccgaagaacggtaaacctgatgtgagcattcaaagtgcacaatccgtaacagggcaggaagacgtccttaaatcgaaaggctttacgatcgttgataccttgcatgtagaggatagcagcgtcaagccactcgtctcgaagaatttcaataagaaagtggtggagaagatgggactggtgtatcttgttcaatactctccggaccagtttaaaagttccaacattgcgaagaaagaactcagaaaagaattgatggatctgggctttaaagtccgctatataagcgaaaattacaagatgatggcgatcgaaggtacagccactcttcaggcagtacaccctaaccaaaactggcattataatatgattaaagctccggaagcgtgggctattacgtctggatccctgagcgttaaagtagcagtcctggatacagggatcgaccataatcacccatccttggccaacttcgtgaatactaatcttggccggtcgtttgttggaggaaacaccatggatgttcaaggtcatggcacacatgttgctggcacgattgcatcttatgggagtgtaagcggagtgatgcagagtgcgacactgatcccggtcaaagtgctcgataattctggcagcgggtccctttacggtattacgcaaggcatattgtatgccgccgacatcgatgcggacgtcattaacatgtctctgggtggaggaggctataatcagagcatggatgaggctgttcaaacagcagttgctcagggaaccattgtagtagcagcgactggcaatgatggtgcatcgtcgatcagttatcctgctgcctacagcagcgtcattgcggtgggatctgtgacgtccaatcgtacacgatcctcgttttctaactatggatctgggcttgaagttatggcaccgggcagcaacatctacagtacgtatcctaattccagatatacatctttgagtggtacaagcatggctactccgcacgttgcgggcgtagctgggctcattcgcgcagccaacccagacatatctgtcgcgcaagcccgtcagattctgcgggataccgcgcaagaagcaggatcgttcacacagtacggctatggaatcgtcgatgctcatgccgccgttgttgctgcatccggtggtagcggcggc

SEQ ID NO: 1894 - protein, 413 aa, synthetic construct; identical to SEQ ID NO: 564
  REGION 1..413: note = Variant of serine peptidase from Bacillus sinesaloumensis

SEQ ID NO: 1895 - DNA, 1239 bp, synthetic construct
  misc_feature 1..1239: note = Variant of serine peptidase from Bacillus sinesaloumensis
  source 1..1239: mol_type = other DNA
atggcagatcaagctagtcaagctaatggaaaccaggacgtcattgaaggcgagctgatcgtttcagtggaaccgaagaacggtaaacctgatgtgagcattcaaagtgcacaatccgtaacagggcaggaagacgtccttaaatcgaaaggctttacgatcgttgataccttgcatgtagaggatagcagcgtcaagccactcgtctcgaagaatttcaataagaaagtggtggagaagatgggactggtgtatcttgttcaatactctccggaccagtttaaaagttccaacattgcgaagaaagaactcagaaaagaattgatggatctgggctttaaagtccgctatataagcgaaaattacaagatgatggcgatcgaaggtacagccactcttcaggcagtacaccctaaccaaaactggcattataatatgattaaagctccggaagcgtgggctattacgtctggatcctttagcgttaaagtagcagtcctggatacagggatcgaccataatcacccatccttggccaacttcgtgaatactaatcttggccggtcgtttgttggaggaaacaccatggatgttcaaggtcatggcacacatgttgctggcacgattgcatcttatgggagtgtaagcggagtgatgcagagtgcgacactgatcccggtcaaagtgctcgataattctggcagcgggtccctttacggtattacgcaaggcatattgtatgccgccgacatcgatgcggacgtcattaacatgtctctgggtggaggaggctataatcagagcatggatgaggctgttcaaacagcagttgctcagggaaccattgtagtagcagcgactggcaatgatggtgcatcgtcgatcagttatcctgctgcctacagcagcgtcattgcggtgggatctgtgacgtccaatcgtacacgatcctcgttttctaactatggatctgggcttgaagttatggcaccgggcagcaacatctacagtacgtatcctaattccagatatacatctttgagtggtacaagcatggctactccgcacgttgcgggcgtagctgggctcattcgcgcagccaacccagacatatctgtcgcgcaagcccgtcagattctgcgggataccgcgcaagaagcaggatcgttcacacagtacggctatggaatcgtcgatgctcatgccgccgttgttgctgcatccggtggtagcggcggc

SEQ ID NO: 1896 - protein, 413 aa, synthetic construct
  REGION 1..413: note = Variant of serine peptidase from Bacillus sinesaloumensis
MADQASQANGNQDVIEGELIVSVEPKNGKPDVSIQSAQSVTGQEDVLKSKGFTIVDTLHVEDSSVKPLVSKNFNKKVVEKMGLVYLVQYSPDQFKSSNIAKKELRKELMDLGFKVRYISENYKMMAIEGTATLQAVHPNQNWHYNMIKAPEAWAITSGSFSVKVAVLDTGIDHNHPSLANFVNTNLGRSFVGGNTMDVQGHGTHVAGTIASYGSVSGVMQSATLIPVKVLDNSGSGSLYGITQGILYAADIDADVINMSLGGGGYNQSMDEAVQTAVAQGTIVVAATGNDGASSISYPAAYSSVIAVGSVTSNRTRSSFSNYGSGLEVMAPGSNIYSTYPNSRYTSLSGTSMATPHVAGVAGLIRAANPDISVAQARQILRDTAQEAGSFTQYGYGIVDAHAAVVAASGGSGG

SEQ ID NO: 1897 - DNA, 1239 bp, synthetic construct
  misc_feature 1..1239: note = Variant of serine peptidase from Bacillus sinesaloumensis
  source 1..1239: mol_type = other DNA
atggcagatcaagctagtcaagctaatggaaaccaggacgtcattgaaggcgagctgatcgtttcagtggaaccgaagaacggtaaacctgatgtgagcattcaaagtgcacaatccgtaacagggcaggaagacgtccttaaatcgaaaggctttacgatcgttgataccttgcatgtagaggatagcagcgtcaagccactcgtctcgaagaatttcaataagaaagtggtggagaagatgggactggtgtatcttgttcaatactctccggaccagtttaaaagttccaacattgcgaagaaagaactcagaaaagaattgatggatctgggctttaaagtccgctatataagcgaaaattacaagatgatggcgatcgaaggtacagccactcttcaggcagtacaccctaaccaaaactggcattataatatgattaaagctccggaagcgtgggctattacgtctggatccactagcgttaaagtagcagtcctggatacagggatcgaccataatcacccatccttggccaacttcgtgaatactaatcttggccggtcgtttgttggaggaaacaccatggatgttcaaggtcatggcacacatgttgctggcacgattgcatcttatgggagtgtaagcggagtgatgcagagtgcgacactgatcccggtcaaagtgctcgataattctggcagcgggtccctttacggtattacgcaaggcatattgtatgccgccgacatcgatgcggacgtcattaacatgtctctgggtggaggaggctataatcagagcatggatgaggctgttcaaacagcagttgctcagggaaccattgtagtagcagcgactggcaatgatggtgcatcgtcgatcagttatcctgctgcctacagcagcgtcattgcggtgggatctgtgacgtccaatcgtacacgatcctcgttttctaactatggatctgggcttgaagttatggcaccgggcagcaacatctacagtacgtatcctaattccagatatacatctttgagtggtacaagcatggctactccgcacgttgcgggcgtagctgggctcattcgcgcagccaacccagacatatctgtcgcgcaagcccgtcagattctgcgggataccgcgcaagaagcaggatcgttcacacagtacggctatggaatcgtcgatgctcatgccgccgttgttgctgcatccggtggtagcggcggc

SEQ ID NO: 1898 - protein, 413 aa, synthetic construct; identical to SEQ ID NO: 350
  REGION 1..413: note = Variant of serine peptidase from Bacillus sinesaloumensis

SEQ ID NO: 1899 - DNA, 1239 bp, synthetic construct
  misc_feature 1..1239: note = Variant of serine peptidase from Bacillus sinesaloumensis
  source 1..1239: mol_type = other DNA
atggcagatcaagctagtcaagctaatggaaaccaggacgtcattgaaggcgagctgatcgtttcagtggaaccgaagaacggtaaacctgatgtgagcattcaaagtgcacaatccgtaacagggcaggaagacgtccttaaatcgaaaggctttacgatcgttgataccttgcatgtagaggatagcagcgtcaagccactcgtctcgaagaatttcaataagaaagtggtggagaagatgggactggtgtatcttgttcaatactctccggaccagtttaaaagttccaacattgcgaagaaagaactcagaaaagaattgatggatctgggctttaaagtccgctatataagcgaaaattacaagatgatggcgatcgaaggtacagccactcttcaggcagtacaccctaaccaaaactggcattataatatgattaaagctccggaagcgtgggctattacgtctggatccgatagcgttaaagtagcagtcctggatacagggatcgaccataatcacccatccttggccaacttcgtgaatactaatcttggccggtcgtttgttggaggaaacaccatggatgttcaaggtcatggcacacatgttgctggcacgattgcatcttatgggagtgtaagcggagtgatgcagagtgcgacactgatcccggtcaaagtgctcgataattctggcagcgggtccctttacggtattacgcaaggcatattgtatgccgccgacatcgatgcggacgtcattaacatgtctctgggtggaggaggctataatcagagcatggatgaggctgttcaaacagcagttgctcagggaaccattgtagtagcagcgactggcaatgatggtgcatcgtcgatcagttatcctgctgcctacagcagcgtcattgcggtgggatctgtgacgtccaatcgtacacgatcctcgttttctaactatggatctgggcttgaagttatggcaccgggcagcaacatctacagtacgtatcctaattccagatatacatctttgagtggtacaagcatggctactccgcacgttgcgggcgtagctgggctcattcgcgcagccaacccagacatatctgtcgcgcaagcccgtcagattctgcgggataccgcgcaagaagcaggatcgttcacacagtacggctatggaatcgtcgatgctcatgccgccgttgttgctgcatccggtggtagcggcggc

SEQ ID NO: 1900 - protein, 413 aa, synthetic construct
  REGION 1..413: note = Variant of serine peptidase from Bacillus sinesaloumensis
MADQASQANGNQDVIEGELIVSVEPKNGKPDVSIQSAQSVTGQEDVLKSKGFTIVDTLHVEDSSVKPLVSKNFNKKVVEKMGLVYLVQYSPDQFKSSNIAKKELRKELMDLGFKVRYISENYKMMAIEGTATLQAVHPNQNWHYNMIKAPEAWAITSGSDSVKVAVLDTGIDHNHPSLANFVNTNLGRSFVGGNTMDVQGHGTHVAGTIASYGSVSGVMQSATLIPVKVLDNSGSGSLYGITQGILYAADIDADVINMSLGGGGYNQSMDEAVQTAVAQGTIVVAATGNDGASSISYPAAYSSVIAVGSVTSNRTRSSFSNYGSGLEVMAPGSNIYSTYPNSRYTSLSGTSMATPHVAGVAGLIRAANPDISVAQARQILRDTAQEAGSFTQYGYGIVDAHAAVVAASGGSGG

SEQ ID NO: 1901 - DNA, 1239 bp, synthetic construct
  misc_feature 1..1239: note = Variant of serine peptidase from Bacillus sinesaloumensis
  source 1..1239: mol_type = other DNA
atggcagatcaagctagtcaagctaatggaaaccaggacgtcattgaaggcgagctgatcgtttcagtggaaccgaagaacggtaaacctgatgtgagcattcaaagtgcacaatccgtaacagggcaggaagacgtccttaaatcgaaaggctttacgatcgttgataccttgcatgtagaggatagcagcgtcaagccactcgtctcgaagaatttcaataagaaagtggtggagaagatgggactggtgtatcttgttcaatactctccggaccagtttaaaagttccaacattgcgaagaaagaactcagaaaagaattgatggatctgggctttaaagtccgctatataagcgaaaattacaagatgatggcgatcgaaggtacagccactcttcaggcagtacaccctaaccaaaactggcattataatatgattaaagctccggaagcgtgggctattacgtctggatcctatagcgttaaagtagcagtcctggatacagggatcgaccataatcacccatccttggccaacttcgtgaatactaatcttggccggtcgtttgttggaggaaacaccatggatgttcaaggtcatggcacacatgttgctggcacgattgcatcttatgggagtgtaagcggagtgatgcagagtgcgacactgatcccggtcaaagtgctcgataattctggcagcgggtccctttacggtattacgcaaggcatattgtatgccgccgacatcgatgcggacgtcattaacatgtctctgggtggaggaggctataatcagagcatggatgaggctgttcaaacagcagttgctcagggaaccattgtagtagcagcgactggcaatgatggtgcatcgtcgatcagttatcctgctgcctacagcagcgtcattgcggtgggatctgtgacgtccaatcgtacacgatcctcgttttctaactatggatctgggcttgaagttatggcaccgggcagcaacatctacagtacgtatcctaattccagatatacatctttgagtggtacaagcatggctactccgcacgttgcgggcgtagctgggctcattcgcgcagccaacccagacatatctgtcgcgcaagcccgtcagattctgcgggataccgcgcaagaagcaggatcgttcacacagtacggctatggaatcgtcgatgctcatgccgccgttgttgctgcatccggtggtagcggcggc

SEQ ID NO: 1902 - protein, 413 aa, synthetic construct
  REGION 1..413: note = Variant of serine peptidase from Bacillus sinesaloumensis
MADQASQANGNQDVIEGELIVSVEPKNGKPDVSIQSAQSVTGQEDVLKSKGFTIVDTLHVEDSSVKPLVSKNFNKKVVEKMGLVYLVQYSPDQFKSSNIAKKELRKELMDLGFKVRYISENYKMMAIEGTATLQAVHPNQNWHYNMIKAPEAWAITSGSYSVKVAVLDTGIDHNHPSLANFVNTNLGRSFVGGNTMDVQGHGTHVAGTIASYGSVSGVMQSATLIPVKVLDNSGSGSLYGITQGILYAADIDADVINMSLGGGGYNQSMDEAVQTAVAQGTIVVAATGNDGASSISYPAAYSSVIAVGSVTSNRTRSSFSNYGSGLEVMAPGSNIYSTYPNSRYTSLSGTSMATPHVAGVAGLIRAANPDISVAQARQILRDTAQEAGSFTQYGYGIVDAHAAVVAASGGSGG

SEQ ID NO: 1903 - DNA, 1239 bp, synthetic construct
  misc_feature 1..1239: note = Variant of serine peptidase from Bacillus sinesaloumensis
  source 1..1239: mol_type = other DNA
atggcagatcaagctagtcaagctaatggaaaccaggacgtcattgaaggcgagctgatcgtttcagtggaaccgaagaacggtaaacctgatgtgagcattcaaagtgcacaatccgtaacagggcaggaagacgtccttaaatcgaaaggctttacgatcgttgataccttgcatgtagaggatagcagcgtcaagccactcgtctcgaagaatttcaataagaaagtggtggagaagatgggactggtgtatcttgttcaatactctccggaccagtttaaaagttccaacattgcgaagaaagaactcagaaaagaattgatggatctgggctttaaagtccgctatataagcgaaaattacaagatgatggcgatcgaaggtacagccactcttcaggcagtacaccctaaccaaaactggcattataatatgattaaagctccggaagcgtgggctattacgtctggatcctggagcgttaaagtagcagtcctggatacagggatcgaccataatcacccatccttggccaacttcgtgaatactaatcttggccggtcgtttgttggaggaaacaccatggatgttcaaggtcatggcacacatgttgctggcacgattgcatcttatgggagtgtaagcggagtgatgcagagtgcgacactgatcccggtcaaagtgctcgataattctggcagcgggtccctttacggtattacgcaaggcatattgtatgccgccgacatcgatgcggacgtcattaacatgtctctgggtggaggaggctataatcagagcatggatgaggctgttcaaacagcagttgctcagggaaccattgtagtagcagcgactggcaatgatggtgcatcgtcgatcagttatcctgctgcctacagcagcgtcattgcggtgggatctgtgacgtccaatcgtacacgatcctcgttttctaactatggatctgggcttgaagttatggcaccgggcagcaacatctacagtacgtatcctaattccagatatacatctttgagtggtacaagcatggctactccgcacgttgcgggcgtagctgggctcattcgcgcagccaacccagacatatctgtcgcgcaagcccgtcagattctgcgggataccgcgcaagaagcaggatcgttcacacagtacggctatggaatcgtcgatgctcatgccgccgttgttgctgcatccggtggtagcggcggc

SEQ ID NO: 1904 - protein, 413 aa, synthetic construct
  REGION 1..413: note = Variant of serine peptidase from Bacillus sinesaloumensis
MADQASQANGNQDVIEGELIVSVEPKNGKPDVSIQSAQSVTGQEDVLKSKGFTIVDTLHVEDSSVKPLVSKNFNKKVVEKMGLVYLVQYSPDQFKSSNIAKKELRKELMDLGFKVRYISENYKMMAIEGTATLQAVHPNQNWHYNMIKAPEAWAITSGSWSVKVAVLDTGIDHNHPSLANFVNTNLGRSFVGGNTMDVQGHGTHVAGTIASYGSVSGVMQSATLIPVKVLDNSGSGSLYGITQGILYAADIDADVINMSLGGGGYNQSMDEAVQTAVAQGTIVVAATGNDGASSISYPAAYSSVIAVGSVTSNRTRSSFSNYGSGLEVMAPGSNIYSTYPNSRYTSLSGTSMATPHVAGVAGLIRAANPDISVAQARQILRDTAQEAGSFTQYGYGIVDAHAAVVAASGGSGG

SEQ ID NO: 1905 - DNA, 1239 bp, synthetic construct
  misc_feature 1..1239: note = Variant of serine peptidase from Bacillus sinesaloumensis
  source 1..1239: mol_type = other DNA
atggcagatcaagctagtcaagctaatggaaaccaggacgtcattgaaggcgagctgatcgtttcagtggaaccgaagaacggtaaacctgatgtgagcattcaaagtgcacaatccgtaacagggcaggaagacgtccttaaatcgaaaggctttacgatcgttgataccttgcatgtagaggatagcagcgtcaagccactcgtctcgaagaatttcaataagaaagtggtggagaagatgggactggtgtatcttgttcaatactctccggaccagtttaaaagttccaacattgcgaagaaagaactcagaaaagaattgatggatctgggctttaaagtccgctatataagcgaaaattacaagatgatggcgatcgaaggtacagccactcttcaggcagtacaccctaaccaaaactggcattataatatgattaaagctccggaagcgtgggctattacgtctggatccgagagcgttaaagtagcagtcctggatacagggatcgaccataatcacccatccttggccaacttcgtgaatactaatcttggccggtcgtttgttggaggaaacaccatggatgttcaaggtcatggcacacatgttgctggcacgattgcatcttatgggagtgtaagcggagtgatgcagagtgcgacactgatcccggtcaaagtgctcgataattctggcagcgggtccctttacggtattacgcaaggcatattgtatgccgccgacatcgatgcggacgtcattaacatgtctctgggtggaggaggctataatcagagcatggatgaggctgttcaaacagcagttgctcagggaaccattgtagtagcagcgactggcaatgatggtgcatcgtcgatcagttatcctgctgcctacagcagcgtcattgcggtgggatctgtgacgtccaatcgtacacgatcctcgttttctaactatggatctgggcttgaagttatggcaccgggcagcaacatctacagtacgtatcctaattccagatatacatctttgagtggtacaagcatggctactccgcacgttgcgggcgtagctgggctcattcgcgcagccaacccagacatatctgtcgcgcaagcccgtcagattctgcgggataccgcgcaagaagcaggatcgttcacacagtacggctatggaatcgtcgatgctcatgccgccgttgttgctgcatccggtggtagcggcggc

SEQ ID NO: 1906 - protein, 413 aa, synthetic construct
  REGION 1..413: note = Variant of serine peptidase from Bacillus sinesaloumensis
MADQASQANGNQDVIEGELIVSVEPKNGKPDVSIQSAQSVTGQEDVLKSKGFTIVDTLHVEDSSVKPLVSKNFNKKVVEKMGLVYLVQYSPDQFKSSNIAKKELRKELMDLGFKVRYISENYKMMAIEGTATLQAVHPNQNWHYNMIKAPEAWAITSGSESVKVAVLDTGIDHNHPSLANFVNTNLGRSFVGGNTMDVQGHGTHVAGTIASYGSVSGVMQSATLIPVKVLDNSGSGSLYGITQGILYAADIDADVINMSLGGGGYNQSMDEAVQTAVAQGTIVVAATGNDGASSISYPAAYSSVIAVGSVTSNRTRSSFSNYGSGLEVMAPGSNIYSTYPNSRYTSLSGTSMATPHVAGVAGLIRAANPDISVAQARQILRDTAQEAGSFTQYGYGIVDAHAAVVAASGGSGG

SEQ ID NO: 1907 - DNA, 1239 bp, synthetic construct
  misc_feature 1..1239: note = Variant of serine peptidase from Bacillus sinesaloumensis
  source 1..1239: mol_type = other DNA
atggcagatcaagctagtcaagctaatggaaaccaggacgtcattgaaggcgagctgatcgtttcagtggaaccgaagaacggtaaacctgatgtgagcattcaaagtgcacaatccgtaacagggcaggaagacgtccttaaatcgaaaggctttacgatcgttgataccttgcatgtagaggatagcagcgtcaagccactcgtctcgaagaatttcaataagaaagtggtggagaagatgggactggtgtatcttgttcaatactctccggaccagtttaaaagttccaacattgcgaagaaagaactcagaaaagaattgatggatctgggctttaaagtccgctatataagcgaaaattacaagatgatggcgatcgaaggtacagccactcttcaggcagtacaccctaaccaaaactggcattataatatgattaaagctccggaagcgtgggctattacgtctggatccaagagcgttaaagtagcagtcctggatacagggatcgaccataatcacccatccttggccaacttcgtgaatactaatcttggccggtcgtttgttggaggaaacaccatggatgttcaaggtcatggcacacatgttgctggcacgattgcatcttatgggagtgtaagcggagtgatgcagagtgcgacactgatcccggtcaaagtgctcgataattctggcagcgggtccctttacggtattacgcaaggcatattgtatgccgccgacatcgatgcggacgtcattaacatgtctctgggtggaggaggctataatcagagcatggatgaggctgttcaaacagcagttgctcagggaaccattgtagtagcagcgactggcaatgatggtgcatcgtcgatcagttatcctgctgcctacagcagcgtcattgcggtgggatctgtgacgtccaatcgtacacgatcctcgttttctaactatggatctgggcttgaagttatggcaccgggcagcaacatctacagtacgtatcctaattccagatatacatctttgagtggtacaagcatggctactccgcacgttgcgggcgtagctgggctcattcgcgcagccaacccagacatatctgtcgcgcaagcccgtcagattctgcgggataccgcgcaagaagcaggatcgttcacacagtacggctatggaatcgtcgatgctcatgccgccgttgttgctgcatccggtggtagcggcggc

SEQ ID NO: 1908 - protein, 413 aa, synthetic construct
  REGION 1..413: note = Variant of serine peptidase from Bacillus sinesaloumensis
MADQASQANGNQDVIEGELIVSVEPKNGKPDVSIQSAQSVTGQEDVLKSKGFTIVDTLHVEDSSVKPLVSKNFNKKVVEKMGLVYLVQYSPDQFKSSNIAKKELRKELMDLGFKVRYISENYKMMAIEGTATLQAVHPNQNWHYNMIKAPEAWAITSGSKSVKVAVLDTGIDHNHPSLANFVNTNLGRSFVGGNTMDVQGHGTHVAGTIASYGSVSGVMQSATLIPVKVLDNSGSGSLYGITQGILYAADIDADVINMSLGGGGYNQSMDEAVQTAVAQGTIVVAATGNDGASSISYPAAYSSVIAVGSVTSNRTRSSFSNYGSGLEVMAPGSNIYSTYPNSRYTSLSGTSMATPHVAGVAGLIRAANPDISVAQARQILRDTAQEAGSFTQYGYGIVDAHAAVVAASGGSGG

SEQ ID NO: 1909 - DNA, 1239 bp, synthetic construct
  misc_feature 1..1239: note = Variant of serine peptidase from Bacillus sinesaloumensis
  source 1..1239: mol_type = other DNA
atggcagatcaagctagtcaagctaatggaaaccaggacgtcattgaaggcgagctgatcgtttcagtggaaccgaagaacggtaaacctgatgtgagcattcaaagtgcacaatccgtaacagggcaggaagacgtccttaaatcgaaaggctttacgatcgttgataccttgcatgtagaggatagcagcgtcaagccactcgtctcgaagaatttcaataagaaagtggtggagaagatgggactggtgtatcttgttcaatactctccggaccagtttaaaagttccaacattgcgaagaaagaactcagaaaagaattgatggatctgggctttaaagtccgctatataagcgaaaattacaagatgatggcgatcgaaggtacagccactcttcaggcagtacaccctaaccaaaactggcattataatatgattaaagctccggaagcgtgggctattacgtctggatccaatagcgttaaagtagcagtcctggatacagggatcgaccataatcacccatccttggccaacttcgtgaatactaatcttggccggtcgtttgttggaggaaacaccatggatgttcaaggtcatggcacacatgttgctggcacgattgcatcttatgggagtgtaagcggagtgatgcagagtgcgacactgatcccggtcaaagtgctcgataattctggcagcgggtccctttacggtattacgcaaggcatattgtatgccgccgacatcgatgcggacgtcattaacatgtctctgggtggaggaggctataatcagagcatggatgaggctgttcaaacagcagttgctcagggaaccattgtagtagcagcgactggcaatgatggtgcatcgtcgatcagttatcctgctgcctacagcagcgtcattgcggtgggatctgtgacgtccaatcgtacacgatcctcgttttctaactatggatctgggcttgaagttatggcaccgggcagcaacatctacagtacgtatcctaattccagatatacatctttgagtggtacaagcatggctactccgcacgttgcgggcgtagctgggctcattcgcgcagccaacccagacatatctgtcgcgcaagcccgtcagattctgcgggataccgcgcaagaagcaggatcgttcacacagtacggctatggaatcgtcgatgctcatgccgccgttgttgctgcatccggtggtagcggcggc

SEQ ID NO: 1910 - protein, 413 aa, synthetic construct
  REGION 1..413: note = Variant of serine peptidase from Bacillus sinesaloumensis
MADQASQANGNQDVIEGELIVSVEPKNGKPDVSIQSAQSVTGQEDVLKSKGFTIVDTLHVEDSSVKPLVSKNFNKKVVEKMGLVYLVQYSPDQFKSSNIAKKELRKELMDLGFKVRYISENYKMMAIEGTATLQAVHPNQNWHYNMIKAPEAWAITSGSNSVKVAVLDTGIDHNHPSLANFVNTNLGRSFVGGNTMDVQGHGTHVAGTIASYGSVSGVMQSATLIPVKVLDNSGSGSLYGITQGILYAADIDADVINMSLGGGGYNQSMDEAVQTAVAQGTIVVAATGNDGASSISYPAAYSSVIAVGSVTSNRTRSSFSNYGSGLEVMAPGSNIYSTYPNSRYTSLSGTSMATPHVAGVAGLIRAANPDISVAQARQILRDTAQEAGSFTQYGYGIVDAHAAVVAASGGSGG

SEQ ID NO: 1911 - DNA, 1239 bp, synthetic construct; identical to SEQ ID NO: 49
  misc_feature 1..1239: note = Variant of serine peptidase from Bacillus sinesaloumensis
  source 1..1239: mol_type = other DNA

SEQ ID NO: 1912 - protein, 413 aa, synthetic construct; identical to SEQ ID NO: 50
  REGION 1..413: note = Variant of serine peptidase from Bacillus sinesaloumensis

SEQ ID NO: 1913 - DNA, 1239 bp, synthetic construct
  misc_feature 1..1239: note = Variant of serine peptidase from Bacillus sinesaloumensis
  source 1..1239: mol_type = other DNA
atggcagatcaagctagtcaagctaatggaaaccaggacgtcattgaaggcgagctgatcgtttcagtggaaccgaagaacggtaaacctgatgtgagcattcaaagtgcacaatccgtaacagggcaggaagacgtccttaaatcgaaaggctttacgatcgttgataccttgcatgtagaggatagcagcgtcaagccactcgtctcgaagaatttcaataagaaagtggtggagaagatgggactggtgtatcttgttcaatactctccggaccagtttaaaagttccaacattgcgaagaaagaactcagaaaagaattgatggatctgggctttaaagtccgctatataagcgaaaattacaagatgatggcgatcgaaggtacagccactcttcaggcagtacaccctaaccaaaactggcattataatatgattaaagctccggaagcgtgggctattacgtctggatcctctagcgttaaagtagcagtcctggatacagggatcgaccataatcacccatccttggccaacttcgtgaatactaatcttggccggtcgtttgttggaggaaacaccatggatgttcaaggtcatggcacacatgttgctggcacgattgcatcttatgggggtgtaagcggagtgatgcagagtgcgacactgatcccggtcaaagtgctcgataattctggcagcgggtccctttacggtattacgcaaggcatattgtatgccgccgacatcgatgcggacgtcattaacatgtctctgggtggaggaggctataatcagagcatggatgaggctgttcaaacagcagttgctcagggaaccattgtagtagcagcgactggcaatgatggtgcatcgtcgatcagttatcctgctgcctacagcagcgtcattgcggtgggatctgtgacgtccaatcgtacacgatcctcgttttctaactatggatctgggcttgaagttatggcaccgggcagcaacatctacagtacgtatcctaattccagatatacatctttgagtggtacaagcatggctactccgcacgttgcgggcgtagctgggctcattcgcgcagccaacccagacatatctgtcgcgcaagcccgtcagattctgcgggataccgcgcaagaagcaggatcgttcacacagtacggctatggaatcgtcgatgctcatgccgccgttgttgctgcatccggtggtagcggcggc

SEQ ID NO: 1914 - protein, 413 aa, synthetic construct
  REGION 1..413: note = Variant of serine peptidase from Bacillus sinesaloumensis
MADQASQANGNQDVIEGELIVSVEPKNGKPDVSIQSAQSVTGQEDVLKSKGFTIVDTLHVEDSSVKPLVSKNFNKKVVEKMGLVYLVQYSPDQFKSSNIAKKELRKELMDLGFKVRYISENYKMMAIEGTATLQAVHPNQNWHYNMIKAPEAWAITSGSSSVKVAVLDTGIDHNHPSLANFVNTNLGRSFVGGNTMDVQGHGTHVAGTIASYGGVSGVMQSATLIPVKVLDNSGSGSLYGITQGILYAADIDADVINMSLGGGGYNQSMDEAVQTAVAQGTIVVAATGNDGASSISYPAAYSSVIAVGSVTSNRTRSSFSNYGSGLEVMAPGSNIYSTYPNSRYTSLSGTSMATPHVAGVAGLIRAANPDISVAQARQILRDTAQEAGSFTQYGYGIVDAHAAVVAASGGSGG

SEQ ID NO: 1915 - DNA, 1239 bp, synthetic construct
  misc_feature 1..1239: note = Variant of serine peptidase from Bacillus sinesaloumensis
  source 1..1239: mol_type = other DNA
atggcagatcaagctagtcaagctaatggaaaccaggacgtcattgaaggcgagctgatcgtttcagtggaaccgaagaacggtaaacctgatgtgagcattcaaagtgcacaatccgtaacagggcaggaagacgtccttaaatcgaaaggctttacgatcgttgataccttgcatgtagaggatagcagcgtcaagccactcgtctcgaagaatttcaataagaaagtggtggagaagatgggactggtgtatcttgttcaatactctccggaccagtttaaaagttccaacattgcgaagaaagaactcagaaaagaattgatggatctgggctttaaagtccgctatataagcgaaaattacaagatgatggcgatcgaaggtacagccactcttcaggcagtacaccctaaccaaaactggcattataatatgattaaagctccggaagcgtgggctattacgtctggatcctctagcgttaaagtagcagtcctggatacagggatcgaccataatcacccatccttggccaacttcgtgaatactaatcttggccggtcgtttgttggaggaaacaccatggatgttcaaggtcatggcacacatgttgctggcacgattgcatcttatgggatggtaagcggagtgatgcagagtgcgacactgatcccggtcaaagtgctcgataattctggcagcgggtccctttacggtattacgcaaggcatattgtatgccgccgacatcgatgcggacgtcattaacatgtctctgggtggaggaggctataatcagagcatggatgaggctgttcaaacagcagttgctcagggaaccattgtagtagcagcgactggcaatgatggtgcatcgtcgatcagttatcctgctgcctacagcagcgtcattgcggtgggatctgtgacgtccaatcgtacacgatcctcgttttctaactatggatctgggcttgaagttatggcaccgggcagcaacatctacagtacgtatcctaattccagatatacatctttgagtggtacaagcatggctactccgcacgttgcgggcgtagctgggctcattcgcgcagccaacccagacatatctgtcgcgcaagcccgtcagattctgcgggataccgcgcaagaagcaggatcgttcacacagtacggctatggaatcgtcgatgctcatgccgccgttgttgctgcatccggtggtagcggcggc

SEQ ID NO: 1916 - protein, 413 aa, synthetic construct
  REGION 1..413: note = Variant of serine peptidase from Bacillus sinesaloumensis
MADQASQANGNQDVIEGELIVSVEPKNGKPDVSIQSAQSVTGQEDVLKSKGFTIVDTLHVEDSSVKPLVSKNFNKKVVEKMGLVYLVQYSPDQFKSSNIAKKELRKELMDLGFKVRYISENYKMMAIEGTATLQAVHPNQNWHYNMIKAPEAWAITSGSSSVKVAVLDTGIDHNHPSLANFVNTNLGRSFVGGNTMDVQGHGTHVAGTIASYGMVSGVMQSATLIPVKVLDNSGSGSLYGITQGILYAADIDADVINMSLGGGGYNQSMDEAVQTAVAQGTIVVAATGNDGASSISYPAAYSSVIAVGSVTSNRTRSSFSNYGSGLEVMAPGSNIYSTYPNSRYTSLSGTSMATPHVAGVAGLIRAANPDISVAQARQILRDTAQEAGSFTQYGYGIVDAHAAVVAASGGSGG

SEQ ID NO: 1917 - DNA, 1239 bp, synthetic construct
  misc_feature 1..1239: note = Variant of serine peptidase from Bacillus sinesaloumensis
  source 1..1239: mol_type = other DNA
atggcagatcaagctagtcaagctaatggaaaccaggacgtcattgaaggcgagctgatcgtttcagtggaaccgaagaacggtaaacctgatgtgagcattcaaagtgcacaatccgtaacagggcaggaagacgtccttaaatcgaaaggctttacgatcgttgataccttgcatgtagaggatagcagcgtcaagccactcgtctcgaagaatttcaataagaaagtggtggagaagatgggactggtgtatcttgttcaatactctccggaccagtttaaaagttccaacattgcgaagaaagaactcagaaaagaattgatggatctgggctttaaagtccgctatataagcgaaaattacaagatgatggcgatcgaaggtacagccactcttcaggcagtacaccctaaccaaaactggcattataatatgattaaagctccggaagcgtgggctattacgtctggatcctctagcgttaaagtagcagtcctggatacagggatcgaccataatcacccatccttggccaacttcgtgaatactaatcttggccggtcgtttgttggaggaaacaccatggatgttcaaggtcatggcacacatgttgctggcacgattgcatcttatgggttggtaagcggagtgatgcagagtgcgacactgatcccggtcaaagtgctcgataattctggcagcgggtccctttacggtattacgcaaggcatattgtatgccgccgacatcgatgcggacgtcattaacatgtctctgggtggaggaggctataatcagagcatggatgaggctgttcaaacagcagttgctcagggaaccattgtagtagcagcgactggcaatgatggtgcatcgtcgatcagttatcctgctgcctacagcagcgtcattgcggtgggatctgtgacgtccaatcgtacacgatcctcgttttctaactatggatctgggcttgaagttatggcaccgggcagcaacatctacagtacgtatcctaattccagatatacatctttgagtggtacaagcatggctactccgcacgttgcgggcgtagctgggctcattcgcgcagccaacccagacatatctgtcgcgcaagcccgtcagattctgcgggataccgcgcaagaagcaggatcgttcacacagtacggctatggaatcgtcgatgctcatgccgccgttgttgctgcatccggtggtagcggcggc

SEQ ID NO: 1918 - protein, 413 aa, synthetic construct
  REGION 1..413: note = Variant of serine peptidase from Bacillus sinesaloumensis
MADQASQANGNQDVIEGELIVSVEPKNGKPDVSIQSAQSVTGQEDVLKSKGFTIVDTLHVEDSSVKPLVSKNFNKKVVEKMGLVYLVQYSPDQFKSSNIAKKELRKELMDLGFKVRYISENYKMMAIEGTATLQAVHPNQNWHYNMIKAPEAWAITSGSSSVKVAVLDTGIDHNHPSLANFVNTNLGRSFVGGNTMDVQGHGTHVAGTIASYGLVSGVMQSATLIPVKVLDNSGSGSLYGITQGILYAADIDADVINMSLGGGGYNQSMDEAVQTAVAQGTIVVAATGNDGASSISYPAAYSSVIAVGSVTSNRTRSSFSNYGSGLEVMAPGSNIYSTYPNSRYTSLSGTSMATPHVAGVAGLIRAANPDISVAQARQILRDTAQEAGSFTQYGYGIVDAHAAVVAASGGSGG

SEQ ID NO: 1919 - DNA, 1239 bp, synthetic construct
  misc_feature 1..1239: note = Variant of serine peptidase from Bacillus sinesaloumensis
  source 1..1239: mol_type = other DNA
atggcagatcaagctagtcaagctaatggaaaccaggacgtcattgaaggcgagctgatcgtttcagtggaaccgaagaacggtaaacctgatgtgagcattcaaagtgcacaatccgtaacagggcaggaagacgtccttaaatcgaaaggctttacgatcgttgataccttgcatgtagaggatagcagcgtcaagccactcgtctcgaagaatttcaataagaaagtggtggagaagatgggactggtgtatcttgttcaatactctccggaccagtttaaaagttccaacattgcgaagaaagaactcagaaaagaattgatggatctgggctttaaagtccgctatataagcgaaaattacaagatgatggcgatcgaaggtacagccactcttcaggcagtacaccctaaccaaaactggcattataatatgattaaagctccggaagcgtgggctattacgtctggatcctctagcgttaaagtagcagtcctggatacagggatcgaccataatcacccatccttggccaacttcgtgaatactaatcttggccggtcgtttgttggaggaaacaccatggatgttcaaggtcatggcacacatgttgctggcacgattgcatcttatgggcaggtaagcggagtgatgcagagtgcgacactgatcccggtcaaagtgctcgataattctggcagcgggtccctttacggtattacgcaaggcatattgtatgccgccgacatcgatgcggacgtcattaacatgtctctgggtggaggaggctataatcagagcatggatgaggctgttcaaacagcagttgctcagggaaccattgtagtagcagcgactggcaatgatggtgcatcgtcgatcagttatcctgctgcctacagcagcgtcattgcggtgggatctgtgacgtccaatcgtacacgatcctcgttttctaactatggatctgggcttgaagttatggcaccgggcagcaacatctacagtacgtatcctaattccagatatacatctttgagtggtacaagcatggctactccgcacgttgcgggcgtagctgggctcattcgcgcagccaacccagacatatctgtcgcgcaagcccgtcagattctgcgggataccgcgcaagaagcaggatcgttcacacagtacggctatggaatcgtcgatgctcatgccgccgttgttgctgcatccggtggtagcggcggc

SEQ ID NO: 1920 - protein, 413 aa, synthetic construct
  REGION 1..413: note = Variant of serine peptidase from Bacillus sinesaloumensis
MADQASQANGNQDVIEGELIVSVEPKNGKPDVSIQSAQSVTGQEDVLKSKGFTIVDTLHVEDSSVKPLVSKNFNKKVVEKMGLVYLVQYSPDQFKSSNIAKKELRKELMDLGFKVRYISENYKMMAIEGTATLQAVHPNQNWHYNMIKAPEAWAITSGSSSVKVAVLDTGIDHNHPSLANFVNTNLGRSFVGGNTMDVQGHGTHVAGTIASYGQVSGVMQSATLIPVKVLDNSGSGSLYGITQGILYAADIDADVINMSLGGGGYNQSMDEAVQTAVAQGTIVVAATGNDGASSISYPAAYSSVIAVGSVTSNRTRSSFSNYGSGLEVMAPGSNIYSTYPNSRYTSLSGTSMATPHVAGVAGLIRAANPDISVAQARQILRDTAQEAGSFTQYGYGIVDAHAAVVAASGGSGG

SEQ ID NO: 1921 - DNA, 1239 bp, synthetic construct
  misc_feature 1..1239: note = Variant of serine peptidase from Bacillus sinesaloumensis
  source 1..1239: mol_type = other DNA
atggcagatcaagctagtcaagctaatggaaaccaggacgtcattgaaggcgagctgatcgtttcagtggaaccgaagaacggtaaacctgatgtgagcattcaaagtgcacaatccgtaacagggcaggaagacgtccttaaatcgaaaggctttacgatcgttgataccttgcatgtagaggatagcagcgtcaagccactcgtctcgaagaatttcaataagaaagtggtggagaagatgggactggtgtatcttgttcaatactctccggaccagtttaaaagttccaacattgcgaagaaagaactcagaaaagaattgatggatctgggctttaaagtccgctatataagcgaaaattacaagatgatggcgatcgaaggtacagccactcttcaggcagtacaccctaaccaaaactggcattataatatgattaaagctccggaagcgtgggctattacgtctggatcctctagcgttaaagtagcagtcctggatacagggatcgaccataatcacccatccttggccaacttcgtgaatactaatcttggccggtcgtttgttggaggaaacaccatggatgttcaaggtcatggcacacatgttgctggcacgattgcatcttatgggacggtaagcggagtgatgcagagtgcgacactgatcccggtcaaagtgctcgataattctggcagcgggtccctttacggtattacgcaaggcatattgtatgccgccgacatcgatgcggacgtcattaacatgtctctgggtggaggaggctataatcagagcatggatgaggctgttcaaacagcagttgctcagggaaccattgtagtagcagcgactggcaatgatggtgcatcgtcgatcagttatcctgctgcctacagcagcgtcattgcggtgggatctgtgacgtccaatcgtacacgatcctcgttttctaactatggatctgggcttgaagttatggcaccgggcagcaacatctacagtacgtatcctaattccagatatacatctttgagtggtacaagcatggctactccgcacgttgcgggcgtagctgggctcattcgcgcagccaacccagacatatctgtcgcgcaagcccgtcagattctgcgggataccgcgcaagaagcaggatcgttcacacagtacggctatggaatcgtcgatgctcatgccgccgttgttgctgcatccggtggtagcggcggc

SEQ ID NO: 1922 - protein, 413 aa, synthetic construct
  REGION 1..413: note = Variant of serine peptidase from Bacillus sinesaloumensis
MADQASQANGNQDVIEGELIVSVEPKNGKPDVSIQSAQSVTGQEDVLKSKGFTIVDTLHVEDSSVKPLVSKNFNKKVVEKMGLVYLVQYSPDQFKSSNIAKKELRKELMDLGFKVRYISENYKMMAIEGTATLQAVHPNQNWHYNMIKAPEAWAITSGSSSVKVAVLDTGIDHNHPSLANFVNTNLGRSFVGGNTMDVQGHGTHVAGTIASYGTVSGVMQSATLIPVKVLDNSGSGSLYGITQGILYAADIDADVINMSLGGGGYNQSMDEAVQTAVAQGTIVVAATGNDGASSISYPAAYSSVIAVGSVTSNRTRSSFSNYGSGLEVMAPGSNIYSTYPNSRYTSLSGTSMATPHVAGVAGLIRAANPDISVAQARQILRDTAQEAGSFTQYGYGIVDAHAAVVAASGGSGG

SEQ ID NO: 1923 - DNA, 1239 bp, synthetic construct
  misc_feature 1..1239: note = Variant of serine peptidase from Bacillus sinesaloumensis
  source 1..1239: mol_type = other DNA
atggcagatcaagctagtcaagctaatggaaaccaggacgtcattgaaggcgagctgatcgtttcagtggaaccgaagaacggtaaacctgatgtgagcattcaaagtgcacaatccgtaacagggcaggaagacgtccttaaatcgaaaggctttacgatcgttgataccttgcatgtagaggatagcagcgtcaagccactcgtctcgaagaatttcaataagaaagtggtggagaagatgggactggtgtatcttgttcaatactctccggaccagtttaaaagttccaacattgcgaagaaagaactcagaaaagaattgatggatctgggctttaaagtccgctatataagcgaaaattacaagatgatggcgatcgaaggtacagccactcttcaggcagtacaccctaaccaaaactggcattataatatgattaaagctccggaagcgtgggctattacgtctggatcctctagcgttaaagtagcagtcctggatacagggatcgaccataatcacccatccttggccaacttcgtgaatactaatcttggccggtcgtttgttggaggaaacaccatggatgttcaaggtcatggcacacatgttgctggcacgattgcatcttatgggccggtaagcggagtgatgcagagtgcgacactgatcccggtcaaagtgctcgataattctggcagcgggtccctttacggtattacgcaaggcatattgtatgccgccgacatcgatgcggacgtcattaacatgtctctgggtggaggaggctataatcagagcatggatgaggctgttcaaacagcagttgctcagggaaccattgtagtagcagcgactggcaatgatggtgcatcgtcgatcagttatcctgctgcctacagcagcgtcattgcggtgggatctgtgacgtccaatcgtacacgatcctcgttttctaactatggatctgggcttgaagttatggcaccgggcagcaacatctacagtacgtatcctaattccagatatacatctttgagtggtacaagcatggctactccgcacgttgcgggcgtagctgggctcattcgcgcagccaacccagacatatctgtcgcgcaagcccgtcagattctgcgggataccgcgcaagaagcaggatcgttcacacagtacggctatggaatcgtcgatgctcatgccgccgttgttgctgcatccggtggtagcggcggc

SEQ ID NO: 1924 - protein, 413 aa, synthetic construct
  REGION 1..413: note = Variant of serine peptidase from Bacillus sinesaloumensis
MADQASQANGNQDVIEGELIVSVEPKNGKPDVSIQSAQSVTGQEDVLKSKGFTIVDTLHVEDSSVKPLVSKNFNKKVVEKMGLVYLVQYSPDQFKSSNIAKKELRKELMDLGFKVRYISENYKMMAIEGTATLQAVHPNQNWHYNMIKAPEAWAITSGSSSVKVAVLDTGIDHNHPSLANFVNTNLGRSFVGGNTMDVQGHGTHVAGTIASYGPVSGVMQSATLIPVKVLDNSGSGSLYGITQGILYAADIDADVINMSLGGGGYNQSMDEAVQTAVAQGTIVVAATGNDGASSISYPAAYSSVIAVGSVTSNRTRSSFSNYGSGLEVMAPGSNIYSTYPNSRYTSLSGTSMATPHVAGVAGLIRAANPDISVAQARQILRDTAQEAGSFTQYGYGIVDAHAAVVAASGGSGG

SEQ ID NO: 1925 - DNA, 1239 bp, synthetic construct
  misc_feature 1..1239: note = Variant of serine peptidase from Bacillus sinesaloumensis
  source 1..1239: mol_type = other DNA
atggcagatcaagctagtcaagctaatggaaaccaggacgtcattgaaggcgagctgatcgtttcagtggaaccgaagaacggtaaacctgatgtgagcattcaaagtgcacaatccgtaacagggcaggaagacgtccttaaatcgaaaggctttacgatcgttgataccttgcatgtagaggatagcagcgtcaagccactcgtctcgaagaatttcaataagaaagtggtggagaagatgggactggtgtatcttgttcaatactctccggaccagtttaaaagttccaacattgcgaagaaagaactcagaaaagaattgatggatctgggctttaaagtccgctatataagcgaaaattacaagatgatggcgatcgaaggtacagccactcttcaggcagtacaccctaaccaaaactggcattataatatgattaaagctccggaagcgtgggctattacgtctggatcctctagcgttaaagtagcagtcctggatacagggatcgaccataatcacccatccttggccaacttcgtgaatactaatcttggccggtcgtttgttggaggaaacaccatggatgttcaaggtcatggcacacatgttgctggcacgattgcatcttatgggcgggtaagcggagtgatgcagagtgcgacactgatcccggtcaaagtgctcgataattctggcagcgggtccctttacggtattacgcaaggcatattgtatgccgccgacatcgatgcggacgtcattaacatgtctctgggtggaggaggctataatcagagcatggatgaggctgttcaaacagcagttgctcagggaaccattgtagtagcagcgactggcaatgatggtgcatcgtcgatcagttatcctgctgcctacagcagcgtcattgcggtgggatctgtgacgtccaatcgtacacgatcctcgttttctaactatggatctgggcttgaagttatggcaccgggcagcaacatctacagtacgtatcctaattccagatatacatctttgagtggtacaagcatggctactccgcacgttgcgggcgtagctgggctcattcgcgcagccaacccagacatatctgtcgcgcaagcccgtcagattctgcgggataccgcgcaagaagcaggatcgttcacacagtacggctatggaatcgtcgatgctcatgccgccgttgttgctgcatccggtggtagcggcggc

SEQ ID NO: 1926 - protein, 413 aa, synthetic construct
  REGION 1..413: note = Variant of serine peptidase from Bacillus sinesaloumensis
MADQASQANGNQDVIEGELIVSVEPKNGKPDVSIQSAQSVTGQEDVLKSKGFTIVDTLHVEDSSVKPLVSKNFNKKVVEKMGLVYLVQYSPDQFKSSNIAKKELRKELMDLGFKVRYISENYKMMAIEGTATLQAVHPNQNWHYNMIKAPEAWAITSGSSSVKVAVLDTGIDHNHPSLANFVNTNLGRSFVGGNTMDVQGHGTHVAGTIASYGRVSGVMQSATLIPVKVLDNSGSGSLYGITQGILYAADIDADVINMSLGGGGYNQSMDEAVQTAVAQGTIVVAATGNDGASSISYPAAYSSVIAVGSVTSNRTRSSFSNYGSGLEVMAPGSNIYSTYPNSRYTSLSGTSMATPHVAGVAGLIRAANPDISVAQARQILRDTAQEAGSFTQYGYGIVDAHAAVVAASGGSGG

SEQ ID NO: 1927 - DNA, 1239 bp, synthetic construct
  misc_feature 1..1239: note = Variant of serine peptidase from Bacillus sinesaloumensis
  source 1..1239: mol_type = other DNA
atggcagatcaagctagtcaagctaatggaaaccaggacgtcattgaaggcgagctgatcgtttcagtggaaccgaagaacggtaaacctgatgtgagcattcaaagtgcacaatccgtaacagggcaggaagacgtccttaaatcgaaaggctttacgatcgttgataccttgcatgtagaggatagcagcgtcaagccactcgtctcgaagaatttcaataagaaagtggtggagaagatgggactggtgtatcttgttcaatactctccggaccagtttaaaagttccaacattgcgaagaaagaactcagaaaagaattgatggatctgggctttaaagtccgctatataagcgaaaattacaagatgatggcgatcgaaggtacagccactcttcaggcagtacaccctaaccaaaactggcattataatatgattaaagctccggaagcgtgggctattacgtctggatcctctagcgttaaagtagcagtcctggatacagggatcgaccataatcacccatccttggccaacttcgtgaatactaatcttggccggtcgtttgttggaggaaacaccatggatgttcaaggtcatggcacacatgttgctggcacgattgcatcttatggggatgtaagcggagtgatgcagagtgcgacactgatcccggtcaaagtgctcgataattctggcagcgggtccctttacggtattacgcaaggcatattgtatgccgccgacatcgatgcggacgtcattaacatgtctctgggtggaggaggctataatcagagcatggatgaggctgttcaaacagcagttgctcagggaaccattgtagtagcagcgactggcaatgatggtgcatcgtcgatcagttatcctgctgcctacagcagcgtcattgcggtgggatctgtgacgtccaatcgtacacgatcctcgttttctaactatggatctgggcttgaagttatggcaccgggcagcaacatctacagtacgtatcctaattccagatatacatctttgagtggtacaagcatggctactccgcacgttgcgggcgtagctgggctcattcgcgcagccaacccagacatatctgtcgcgcaagcccgtcagattctgcgggataccgcgcaagaagcaggatcgttcacacagtacggctatggaatcgtcgatgctcatgccgccgttgttgctgcatccggtggtagcggcggc

SEQ ID NO: 1928 - protein, 413 aa, synthetic construct
  REGION 1..413: note = Variant of serine peptidase from Bacillus sinesaloumensis
MADQASQANGNQDVIEGELIVSVEPKNGKPDVSIQSAQSVTGQEDVLKSKGFTIVDTLHVEDSSVKPLVSKNFNKKVVEKMGLVYLVQYSPDQFKSSNIAKKELRKELMDLGFKVRYISENYKMMAIEGTATLQAVHPNQNWHYNMIKAPEAWAITSGSSSVKVAVLDTGIDHNHPSLANFVNTNLGRSFVGGNTMDVQGHGTHVAGTIASYGDVSGVMQSATLIPVKVLDNSGSGSLYGITQGILYAADIDADVINMSLGGGGYNQSMDEAVQTAVAQGTIVVAATGNDGASSISYPAAYSSVIAVGSVTSNRTRSSFSNYGSGLEVMAPGSNIYSTYPNSRYTSLSGTSMATPHVAGVAGLIRAANPDISVAQARQILRDTAQEAGSFTQYGYGIVDAHAAVVAASGGSGG

SEQ ID NO: 1929 - DNA, 1239 bp, synthetic construct
  misc_feature 1..1239: note = Variant of serine peptidase from Bacillus sinesaloumensis
  source 1..1239: mol_type = other DNA
atggcagatcaagctagtcaagctaatggaaaccaggacgtcattgaaggcgagctgatcgtttcagtggaaccgaagaacggtaaacctgatgtgagcattcaaagtgcacaatccgtaacagggcaggaagacgtccttaaatcgaaaggctttacgatcgttgataccttgcatgtagaggatagcagcgtcaagccactcgtctcgaagaatttcaataagaaagtggtggagaagatgggactggtgtatcttgttcaatactctccggaccagtttaaaagttccaacattgcgaagaaagaactcagaaaagaattgatggatctgggctttaaagtccgctatataagcgaaaattacaagatgatggcgatcgaaggtacagccactcttcaggcagtacaccctaaccaaaactggcattataatatgattaaagctccggaagcgtgggctattacgtctggatcctctagcgttaaagtagcagtcctggatacagggatcgaccataatcacccatccttggccaacttcgtgaatactaatcttggccggtcgtttgttggaggaaacaccatggatgttcaaggtcatggcacacatgttgctggcacgattgcatcttatgggtttgtaagcggagtgatgcagagtgcgacactgatcccggtcaaagtgctcgataattctggcagcgggtccctttacggtattacgcaaggcatattgtatgccgccgacatcgatgcggacgtcattaacatgtctctgggtggaggaggctataatcagagcatggatgaggctgttcaaacagcagttgctcagggaaccattgtagtagcagcgactggcaatgatggtgcatcgtcgatcagttatcctgctgcctacagcagcgtcattgcggtgggatctgtgacgtccaatcgtacacgatcctcgttttctaactatggatctgggcttgaagttatggcaccgggcagcaacatctacagtacgtatcctaattccagatatacatctttgagtggtacaagcatggctactccgcacgttgcgggcgtagctgggctcattcgcgcagccaacccagacatatctgtcgcgcaagcccgtcagattctgcgggataccgcgcaagaagcaggatcgttcacacagtacggctatggaatcgtcgatgctcatgccgccgttgttgctgcatccggtggtagcggcggc

SEQ ID NO: 1930 - protein, 413 aa, synthetic construct
  REGION 1..413: note = Variant of serine peptidase from Bacillus sinesaloumensis
MADQASQANGNQDVIEGELIVSVEPKNGKPDVSIQSAQSVTGQEDVLKSKGFTIVDTLHVEDSSVKPLVSKNFNKKVVEKMGLVYLVQYSPDQFKSSNIAKKELRKELMDLGFKVRYISENYKMMAIEGTATLQAVHPNQNWHYNMIKAPEAWAITSGSSSVKVAVLDTGIDHNHPSLANFVNTNLGRSFVGGNTMDVQGHGTHVAGTIASYGFVSGVMQSATLIPVKVLDNSGSGSLYGITQGILYAADIDADVINMSLGGGGYNQSMDEAVQTAVAQGTIVVAATGNDGASSISYPAAYSSVIAVGSVTSNRTRSSFSNYGSGLEVMAPGSNIYSTYPNSRYTSLSGTSMATPHVAGVAGLIRAANPDISVAQARQILRDTAQEAGSFTQYGYGIVDAHAAVVAASGGSGG

SEQ ID NO: 1931 - DNA, 1239 bp, synthetic construct
  misc_feature 1..1239: note = Variant of serine peptidase from Bacillus sinesaloumensis
  source 1..1239: mol_type = other DNA
atggcagatcaagctagtcaagctaatggaaaccaggacgtcattgaaggcgagctgatcgtttcagtggaaccgaagaacggtaaacctgatgtgagcattcaaagtgcacaatccgtaacagggcaggaagacgtccttaaatcgaaaggctttacgatcgttgataccttgcatgtagaggatagcagcgtcaagccactcgtctcgaagaatttcaataagaaagtggtggagaagatgggactggtgtatcttgttcaatactctccggaccagtttaaaagttccaacattgcgaagaaagaactcagaaaagaattgatggatctgggctttaaagtccgctatataagcgaaaattacaagatgatggcgatcgaaggtacagccactcttcaggcagtacaccctaaccaaaactggcattataatatgattaaagctccggaagcgtgggctattacgtctggatcctctagcgttaaagtagcagtcctggatacagggatcgaccataatcacccatccttggccaacttcgtgaatactaatcttggccggtcgtttgttggaggaaacaccatggatgttcaaggtcatggcacacatgttgctggcacgattgcatcttatgggaaggtaagcggagtgatgcagagtgcgacactgatcccggtcaaagtgctcgataattctggcagcgggtccctttacggtattacgcaaggcatattgtatgccgccgacatcgatgcggacgtcattaacatgtctctgggtggaggaggctataatcagagcatggatgaggctgttcaaacagcagttgctcagggaaccattgtagtagcagcgactggcaatgatggtgcatcgtcgatcagttatcctgctgcctacagcagcgtcattgcggtgggatctgtgacgtccaatcgtacacgatcctcgttttctaactatggatctgggcttgaagttatggcaccgggcagcaacatctacagtacgtatcctaattccagatatacatctttgagtggtacaagcatggctactccgcacgttgcgggcgtagctgggctcattcgcgcagccaacccagacatatctgtcgcgcaagcccgtcagattctgcgggataccgcgcaagaagcaggatcgttcacacagtacggctatggaatcgtcgatgctcatgccgccgttgttgctgcatccggtggtagcggcggc

SEQ ID NO: 1932 - protein, 413 aa, synthetic construct
  REGION 1..413: note = Variant of serine peptidase from Bacillus sinesaloumensis
MADQASQANGNQDVIEGELIVSVEPKNGKPDVSIQSAQSVTGQEDVLKSKGFTIVDTLHVEDSSVKPLVSKNFNKKVVEKMGLVYLVQYSPDQFKSSNIAKKELRKELMDLGFKVRYISENYKMMAIEGTATLQAVHPNQNWHYNMIKAPEAWAITSGSSSVKVAVLDTGIDHNHPSLANFVNTNLGRSFVGGNTMDVQGHGTHVAGTIASYGKVSGVMQSATLIPVKVLDNSGSGSLYGITQGILYAADIDADVINMSLGGGGYNQSMDEAVQTAVAQGTIVVAATGNDGASSISYPAAYSSVIAVGSVTSNRTRSSFSNYGSGLEVMAPGSNIYSTYPNSRYTSLSGTSMATPHVAGVAGLIRAANPDISVAQARQILRDTAQEAGSFTQYGYGIVDAHAAVVAASGGSGG

SEQ ID NO: 1933 - DNA, 1239 bp, synthetic construct
  misc_feature 1..1239: note = Variant of serine peptidase from Bacillus sinesaloumensis
  source 1..1239: mol_type = other DNA
atggcagatcaagctagtcaagctaatggaaaccaggacgtcattgaaggcgagctgatcgtttcagtggaaccgaagaacggtaaacctgatgtgagcattcaaagtgcacaatccgtaacagggcaggaagacgtccttaaatcgaaaggctttacgatcgttgataccttgcatgtagaggatagcagcgtcaagccactcgtctcgaagaatttcaataagaaagtggtggagaagatgggactggtgtatcttgttcaatactctccggaccagtttaaaagttccaacattgcgaagaaagaactcagaaaagaattgatggatctgggctttaaagtccgctatataagcgaaaattacaagatgatggcgatcgaaggtacagccactcttcaggcagtacaccctaaccaaaactggcattataatatgattaaagctccggaagcgtgggctattacgtctggatcctctagcgttaaagtagcagtcctggatacagggatcgaccataatcacccatccttggccaacttcgtgaatactaatcttggccggtcgtttgttggaggaaacaccatggatgttcaaggtcatggcacacatgttgctggcacgattgcatcttatggggcggtaagcggagtgatgcagagtgcgacactgatcccggtcaaagtgctcgataattctggcagcgggtccctttacggtattacgcaaggcatattgtatgccgccgacatcgatgcggacgtcattaacatgtctctgggtggaggaggctataatcagagcatggatgaggctgttcaaacagcagttgctcagggaaccattgtagtagcagcgactggcaatgatggtgcatcgtcgatcagttatcctgctgcctacagcagcgtcattgcggtgggatctgtgacgtccaatcgtacacgatcctcgttttctaactatggatctgggcttgaagttatggcaccgggcagcaacatctacagtacgtatcctaattccagatatacatctttgagtggtacaagcatggctactccgcacgttgcgggcgtagctgggctcattcgcgcagccaacccagacatatctgtcgcgcaagcccgtcagattctgcgggataccgcgcaagaagcaggatcgttcacacagtacggctatggaatcgtcgatgctcatgccgccgttgttgctgcatccggtggtagcggcggc

SEQ ID NO: 1934 - protein, 413 aa, synthetic construct
  REGION 1..413: note = Variant of serine peptidase from Bacillus sinesaloumensis
MADQASQANGNQDVIEGELIVSVEPKNGKPDVSIQSAQSVTGQEDVLKSKGFTIVDTLHVEDSSVKPLVSKNFNKKVVEKMGLVYLVQYSPDQFKSSNIAKKELRKELMDLGFKVRYISENYKMMAIEGTATLQAVHPNQNWHYNMIKAPEAWAITSGSSSVKVAVLDTGIDHNHPSLANFVNTNLGRSFVGGNTMDVQGHGTHVAGTIASYGAVSGVMQSATLIPVKVLDNSGSGSLYGITQGILYAADIDADVINMSLGGGGYNQSMDEAVQTAVAQGTIVVAATGNDGASSISYPAAYSSVIAVGSVTSNRTRSSFSNYGSGLEVMAPGSNIYSTYPNSRYTSLSGTSMATPHVAGVAGLIRAANPDISVAQARQILRDTAQEAGSFTQYGYGIVDAHAAVVAASGGSGG

SEQ ID NO: 1935 - DNA, 1239 bp, synthetic construct
  misc_feature 1..1239: note = Variant of serine peptidase from Bacillus sinesaloumensis
  source 1..1239: mol_type = other DNA
atggcagatcaagctagtcaagctaatggaaaccaggacgtcattgaaggcgagctgatcgtttcagtggaaccgaagaacggtaaacctgatgtgagcattcaaagtgcacaatccgtaacagggcaggaagacgtccttaaatcgaaaggctttacgatcgttgataccttgcatgtagaggatagcagcgtcaagccactcgtctcgaagaatttcaataagaaagtggtggagaagatgggactggtgtatcttgttcaatactctccggaccagtttaaaagttccaacattgcgaagaaagaactcagaaaagaattgatggatctgggctttaaagtccgctatataagcgaaaattacaagatgatggcgatcgaaggtacagccactcttcaggcagtacaccctaaccaaaactggcattataatatgattaaagctccggaagcgtgggctattacgtctggatcctctagcgttaaagtagcagtcctggatacagggatcgaccataatcacccatccttggccaacttcgtgaatactaatcttggccggtcgtttgttggaggaaacaccatggatgttcaaggtcatggcacacatgttgctggcacgattgcatcttatggggttgtaagcggagtgatgcagagtgcgacactgatcccggtcaaagtgctcgataattctggcagcgggtccctttacggtattacgcaaggcatattgtatgccgccgacatcgatgcggacgtcattaacatgtctctgggtggaggaggctataatcagagcatggatgaggctgttcaaacagcagttgctcagggaaccattgtagtagcagcgactggcaatgatggtgcatcgtcgatcagttatcctgctgcctacagcagcgtcattgcggtgggatctgtgacgtccaatcgtacacgatcctcgttttctaactatggatctgggcttgaagttatggcaccgggcagcaacatctacagtacgtatcctaattccagatatacatctttgagtggtacaagcatggctactccgcacgttgcgggcgtagctgggctcattcgcgcagccaacccagacatatctgtcgcgcaagcccgtcagattctgcgggataccgcgcaagaagcaggatcgttcacacagtacggctatggaatcgtcgatgctcatgccgccgttgttgctgcatccggtggtagcggcggc

SEQ ID NO: 1936 - protein, 413 aa, synthetic construct
  REGION 1..413: note = Variant of serine peptidase from Bacillus sinesaloumensis
MADQASQANGNQDVIEGELIVSVEPKNGKPDVSIQSAQSVTGQEDVLKSKGFTIVDTLHVEDSSVKPLVSKNFNKKVVEKMGLVYLVQYSPDQFKSSNIAKKELRKELMDLGFKVRYISENYKMMAIEGTATLQAVHPNQNWHYNMIKAPEAWAITSGSSSVKVAVLDTGIDHNHPSLANFVNTNLGRSFVGGNTMDVQGHGTHVAGTIASYGVVSGVMQSATLIPVKVLDNSGSGSLYGITQGILYAADIDADVINMSLGGGGYNQSMDEAVQTAVAQGTIVVAATGNDGASSISYPAAYSSVIAVGSVTSNRTRSSFSNYGSGLEVMAPGSNIYSTYPNSRYTSLSGTSMATPHVAGVAGLIRAANPDISVAQARQILRDTAQEAGSFTQYGYGIVDAHAAVVAASGGSGG

SEQ ID NO: 1937 - DNA, 1239 bp, synthetic construct
  misc_feature 1..1239: note = Variant of serine peptidase from Bacillus sinesaloumensis
  source 1..1239: mol_type = other DNA
atggcagatcaagctagtcaagctaatggaaaccaggacgtcattgaaggcgagctgatcgtttcagtggaaccgaagaacggtaaacctgatgtgagcattcaaagtgcacaatccgtaacagggcaggaagacgtccttaaatcgaaaggctttacgatcgttgataccttgcatgtagaggatagcagcgtcaagccactcgtctcgaagaatttcaataagaaagtggtggagaagatgggactggtgtatcttgttcaatactctccggaccagtttaaaagttccaacattgcgaagaaagaactcagaaaagaattgatggatctgggctttaaagtccgctatataagcgaaaattacaagatgatggcgatcgaaggtacagccactcttcaggcagtacaccctaaccaaaactggcattataatatgattaaagctccggaagcgtgggctattacgtctggatcctctagcgttaaagtagcagtcctggatacagggatcgaccataatcacccatccttggccaacttcgtgaatactaatcttggccggtcgtttgttggaggaaacaccatggatgttcaaggtcatggcacacatgttgctggcacgattgcatcttatgggattgtaagcggagtgatgcagagtgcgacactgatcccggtcaaagtgctcgataattctggcagcgggtccctttacggtattacgcaaggcatattgtatgccgccgacatcgatgcggacgtcattaacatgtctctgggtggaggaggctataatcagagcatggatgaggctgttcaaacagcagttgctcagggaaccattgtagtagcagcgactggcaatgatggtgcatcgtcgatcagttatcctgctgcctacagcagcgtcattgcggtgggatctgtgacgtccaatcgtacacgatcctcgttttctaactatggatctgggcttgaagttatggcaccgggcagcaacatctacagtacgtatcctaattccagatatacatctttgagtggtacaagcatggctactccgcacgttgcgggcgtagctgggctcattcgcgcagccaacccagacatatctgtcgcgcaagcccgtcagattctgcgggataccgcgcaagaagcaggatcgttcacacagtacggctatggaatcgtcgatgctcatgccgccgttgttgctgcatccggtggtagcggcggc

SEQ ID NO: 1938 - protein, 413 aa, synthetic construct
  REGION 1..413: note = Variant of serine peptidase from Bacillus sinesaloumensis
MADQASQANGNQDVIEGELIVSVEPKNGKPDVSIQSAQSVTGQEDVLKSKGFTIVDTLHVEDSSVKPLVSKNFNKKVVEKMGLVYLVQYSPDQFKSSNIAKKELRKELMDLGFKVRYISENYKMMAIEGTATLQAVHPNQNWHYNMIKAPEAWAITSGSSSVKVAVLDTGIDHNHPSLANFVNTNLGRSFVGGNTMDVQGHGTHVAGTIASYGIVSGVMQSATLIPVKVLDNSGSGSLYGITQGILYAADIDADVINMSLGGGGYNQSMDEAVQTAVAQGTIVVAATGNDGASSISYPAAYSSVIAVGSVTSNRTRSSFSNYGSGLEVMAPGSNIYSTYPNSRYTSLSGTSMATPHVAGVAGLIRAANPDISVAQARQILRDTAQEAGSFTQYGYGIVDAHAAVVAASGGSGG

SEQ ID NO: 1939 - DNA, 1239 bp, synthetic construct
  misc_feature 1..1239: note = Variant of serine peptidase from Bacillus sinesaloumensis
  source 1..1239: mol_type = other DNA
atggcagatcaagctagtcaagctaatggaaaccaggacgtcattgaaggcgagctgatcgtttcagtggaaccgaagaacggtaaacctgatgtgagcattcaaagtgcacaatccgtaacagggcaggaagacgtccttaaatcgaaaggctttacgatcgttgataccttgcatgtagaggatagcagcgtcaagccactcgtctcgaagaatttcaataagaaagtggtggagaagatgggactggtgtatcttgttcaatactctccggaccagtttaaaagttccaacattgcgaagaaagaactcagaaaagaattgatggatctgggctttaaagtccgctatataagcgaaaattacaagatgatggcgatcgaaggtacagccactcttcaggcagtacaccctaaccaaaactggcattataatatgattaaagctccggaagcgtgggctattacgtctggatcctctagcgttaaagtagcagtcctggatacagggatcgaccataatcacccatccttggccaacttcgtgaatactaatcttggccggtcgtttgttggaggaaacaccatggatgttcaaggtcatggcacacatgttgctggcacgattgcatcttatggggaggtaagcggagtgatgcagagtgcgacactgatcccggtcaaagtgctcgataattctggcagcgggtccctttacggtattacgcaaggcatattgtatgccgccgacatcgatgcggacgtcattaacatgtctctgggtggaggaggctataatcagagcatggatgaggctgttcaaacagcagttgctcagggaaccattgtagtagcagcgactggcaatgatggtgcatcgtcgatcagttatcctgctgcctacagcagcgtcattgcggtgggatctgtgacgtccaatcgtacacgatcctcgttttctaactatggatctgggcttgaagttatggcaccgggcagcaacatctacagtacgtatcctaattccagatatacatctttgagtggtacaagcatggctactccgcacgttgcgggcgtagctgggctcattcgcgcagccaacccagacatatctgtcgcgcaagcccgtcagattctgcgggataccgcgcaagaagcaggatcgttcacacagtacggctatggaatcgtcgatgctcatgccgccgttgttgctgcatccggtggtagcggcggc

SEQ ID NO: 1940 - protein, 413 aa, synthetic construct
  REGION 1..413: note = Variant of serine peptidase from Bacillus sinesaloumensis
MADQASQANGNQDVIEGELIVSVEPKNGKPDVSIQSAQSVTGQEDVLKSKGFTIVDTLHVEDSSVKPLVSKNFNKKVVEKMGLVYLVQYSPDQFKSSNIAKKELRKELMDLGFKVRYISENYKMMAIEGTATLQAVHPNQNWHYNMIKAPEAWAITSGSSSVKVAVLDTGIDHNHPSLANFVNTNLGRSFVGGNTMDVQGHGTHVAGTIASYGEVSGVMQSATLIPVKVLDNSGSGSLYGITQGILYAADIDADVINMSLGGGGYNQSMDEAVQTAVAQGTIVVAATGNDGASSISYPAAYSSVIAVGSVTSNRTRSSFSNYGSGLEVMAPGSNIYSTYPNSRYTSLSGTSMATPHVAGVAGLIRAANPDISVAQARQILRDTAQEAGSFTQYGYGIVDAHAAVVAASGGSGG

SEQ ID NO: 1941 - DNA, 1239 bp, synthetic construct
  misc_feature 1..1239: note = Variant of serine peptidase from Bacillus sinesaloumensis
  source 1..1239: mol_type = other DNA
atggcagatcaagctagtcaagctaatggaaaccaggacgtcattgaaggcgagctgatcgtttcagtggaaccgaagaacggtaaacctgatgtgagcattcaaagtgcacaatccgtaacagggcaggaagacgtccttaaatcgaaaggctttacgatcgttgataccttgcatgtagaggatagcagcgtcaagccactcgtctcgaagaatttcaataagaaagtggtggagaagatgggactggtgtatcttgttcaatactctccggaccagtttaaaagttccaacattgcgaagaaagaactcagaaaagaattgatggatctgggctttaaagtccgctatataagcgaaaattacaagatgatggcgatcgaaggtacagccactcttcaggcagtacaccctaaccaaaactggcattataatatgattaaagctccggaagcgtgggctattacgtctggatcctctagcgttaaagtagcagtcctggatacagggatcgaccataatcacccatccttggccaacttcgtgaatactaatcttggccggtcgtttgttggaggaaacaccatggatgttcaaggtcatggcacacatgttgctggcacgattgcatcttatgggcatgtaagcggagtgatgcagagtgcgacactgatcccggtcaaagtgctcgataattctggcagcgggtccctttacggtattacgcaaggcatattgtatgccgccgacatcgatgcggacgtcattaacatgtctctgggtggaggaggctataatcagagcatggatgaggctgttcaaacagcagttgctcagggaaccattgtagtagcagcgactggcaatgatggtgcatcgtcgatcagttatcctgctgcctacagcagcgtcattgcggtgggatctgtgacgtccaatcgtacacgatcctcgttttctaactatggatctgggcttgaagttatggcaccgggcagcaacatctacagtacgtatcctaattccagatatacatctttgagtggtacaagcatggctactccgcacgttgcgggcgtagctgggctcattcgcgcagccaacccagacatatctgtcgcgcaagcccgtcagattctgcgggataccgcgcaagaagcaggatcgttcacacagtacggctatggaatcgtcgatgctcatgccgccgttgttgctgcatccggtggtagcggcggc

SEQ ID NO: 1942 - protein, 413 aa, synthetic construct
  REGION 1..413: note = Variant of serine peptidase from Bacillus sinesaloumensis
MADQASQANGNQDVIEGELIVSVEPKNGKPDVSIQSAQSVTGQEDVLKSKGFTIVDTLHVEDSSVKPLVSKNFNKKVVEKMGLVYLVQYSPDQFKSSNIAKKELRKELMDLGFKVRYISENYKMMAIEGTATLQAVHPNQNWHYNMIKAPEAWAITSGSSSVKVAVLDTGIDHNHPSLANFVNTNLGRSFVGGNTMDVQGHGTHVAGTIASYGHVSGVMQSATLIPVKVLDNSGSGSLYGITQGILYAADIDADVINMSLGGGGYNQSMDEAVQTAVAQGTIVVAATGNDGASSISYPAAYSSVIAVGSVTSNRTRSSFSNYGSGLEVMAPGSNIYSTYPNSRYTSLSGTSMATPHVAGVAGLIRAANPDISVAQARQILRDTAQEAGSFTQYGYGIVDAHAAVVAASGGSGG

SEQ ID NO: 1943 - DNA, 1239 bp, synthetic construct
  misc_feature 1..1239: note = Variant of serine peptidase from Bacillus sinesaloumensis
  source 1..1239: mol_type = other DNA
atggcagatcaagctagtcaagctaatggaaaccaggacgtcattgaaggcgagctgatcgtttcagtggaaccgaagaacggtaaacctgatgtgagcattcaaagtgcacaatccgtaacagggcaggaagacgtccttaaatcgaaaggctttacgatcgttgataccttgcatgtagaggatagcagcgtcaagccactcgtctcgaagaatttcaataagaaagtggtggagaagatgggactggtgtatcttgttcaatactctccggaccagtttaaaagttccaacattgcgaagaaagaactcagaaaagaattgatggatctgggctttaaagtccgctatataagcgaaaattacaagatgatggcgatcgaaggtacagccactcttcaggcagtacaccctaaccaaaactggcattataatatgattaaagctccggaagcgtgggctattacgtctggatcctctagcgttaaagtagcagtcctggatacagggatcgaccataatcacccatccttggccaacttcgtgaatactaatcttggccggtcgtttgttggaggaaacaccatggatgttcaaggtcatggcacacatgttgctggcacgattgcatcttatgggtatgtaagcggagtgatgcagagtgcgacactgatcccggtcaaagtgctcgataattctggcagcgggtccctttacggtattacgcaaggcatattgtatgccgccgacatcgatgcggacgtcattaacatgtctctgggtggaggaggctataatcagagcatggatgaggctgttcaaacagcagttgctcagggaaccattgtagtagcagcgactggcaatgatggtgcatcgtcgatcagttatcctgctgcctacagcagcgtcattgcggtgggatctgtgacgtccaatcgtacacgatcctcgttttctaactatggatctgggcttgaagttatggcaccgggcagcaacatctacagtacgtatcctaattccagatatacatctttgagtggtacaagcatggctactccgcacgttgcgggcgtagctgggctcattcgcgcagccaacccagacatatctgtcgcgcaagcccgtcagattctgcgggataccgcgcaagaagcaggatcgttcacacagtacggctatggaatcgtcgatgctcatgccgccgttgttgctgcatccggtggtagcggcggc

SEQ ID NO: 1944 - protein, 413 aa, synthetic construct
  REGION 1..413: note = Variant of serine peptidase from Bacillus sinesaloumensis
MADQASQANGNQDVIEGELIVSVEPKNGKPDVSIQSAQSVTGQEDVLKSKGFTIVDTLHVEDSSVKPLVSKNFNKKVVEKMGLVYLVQYSPDQFKSSNIAKKELRKELMDLGFKVRYISENYKMMAIEGTATLQAVHPNQNWHYNMIKAPEAWAITSGSSSVKVAVLDTGIDHNHPSLANFVNTNLGRSFVGGNTMDVQGHGTHVAGTIASYGYVSGVMQSATLIPVKVLDNSGSGSLYGITQGILYAADIDADVINMSLGGGGYNQSMDEAVQTAVAQGTIVVAATGNDGASSISYPAAYSSVIAVGSVTSNRTRSSFSNYGSGLEVMAPGSNIYSTYPNSRYTSLSGTSMATPHVAGVAGLIRAANPDISVAQARQILRDTAQEAGSFTQYGYGIVDAHAAVVAASGGSGG

SEQ ID NO: 1945 - DNA, 1239 bp, synthetic construct
  misc_feature 1..1239: note = Variant of serine peptidase from Bacillus sinesaloumensis
  source 1..1239: mol_type = other DNA
atggcagatcaagctagtcaagctaatggaaaccaggacgtcattgaaggcgagctgatcgtttcagtggaaccgaagaacggtaaacctgatgtgagcattcaaagtgcacaatccgtaacagggcaggaagacgtccttaaatcgaaaggctttacgatcgttgataccttgcatgtagaggatagcagcgtcaagccactcgtctcgaagaatttcaataagaaagtggtggagaagatgggactggtgtatcttgttcaatactctccggaccagtttaaaagttccaacattgcgaagaaagaactcagaaaagaattgatggatctgggctttaaagtccgctatataagcgaaaattacaagatgatggcgatcgaaggtacagccactcttcaggcagtacaccctaaccaaaactggcattataatatgattaaagctccggaagcgtgggctattacgtctggatcctctagcgttaaagtagcagtcctggatacagggatcgaccataatcacccatccttggccaacttcgtgaatactaatcttggccggtcgtttgttggaggaaacaccatggatgttcaaggtcatggcacacatgttgctggcacgattgcatcttatgggtgtgtaagcggagtgatgcagagtgcgacactgatcccggtcaaagtgctcgataattctggcagcgggtccctttacggtattacgcaaggcatattgtatgccgccgacatcgatgcggacgtcattaacatgtctctgggtggaggaggctataatcagagcatggatgaggctgttcaaacagcagttgctcagggaaccattgtagtagcagcgactggcaatgatggtgcatcgtcgatcagttatcctgctgcctacagcagcgtcattgcggtgggatctgtgacgtccaatcgtacacgatcctcgttttctaactatggatctgggcttgaagttatggcaccgggcagcaacatctacagtacgtatcctaattccagatatacatctttgagtggtacaagcatggctactccgcacgttgcgggcgtagctgggctcattcgcgcagccaacccagacatatctgtcgcgcaagcccgtcagattctgcgggataccgcgcaagaagcaggatcgttcacacagtacggctatggaatcgtcgatgctcatgccgccgttgttgctgcatccggtggtagcggcggc

SEQ ID NO: 1946 - protein, 413 aa, synthetic construct
  REGION 1..413: note = Variant of serine peptidase from Bacillus sinesaloumensis
MADQASQANGNQDVIEGELIVSVEPKNGKPDVSIQSAQSVTGQEDVLKSKGFTIVDTLHVEDSSVKPLVSKNFNKKVVEKMGLVYLVQYSPDQFKSSNIAKKELRKELMDLGFKVRYISENYKMMAIEGTATLQAVHPNQNWHYNMIKAPEAWAITSGSSSVKVAVLDTGIDHNHPSLANFVNTNLGRSFVGGNTMDVQGHGTHVAGTIASYGCVSGVMQSATLIPVKVLDNSGSGSLYGITQGILYAADIDADVINMSLGGGGYNQSMDEAVQTAVAQGTIVVAATGNDGASSISYPAAYSSVIAVGSVTSNRTRSSFSNYGSGLEVMAPGSNIYSTYPNSRYTSLSGTSMATPHVAGVAGLIRAANPDISVAQARQILRDTAQEAGSFTQYGYGIVDAHAAVVAASGGSGG

SEQ ID NO: 1947 - DNA, 1239 bp, synthetic construct
  misc_feature 1..1239: note = Variant of serine peptidase from Bacillus sinesaloumensis
  source 1..1239: mol_type = other DNA
atggcagatcaagctagtcaagctaatggaaaccaggacgtcattgaaggcgagctgatcgtttcagtggaaccgaagaacggtaaacctgatgtgagcattcaaagtgcacaatccgtaacagggcaggaagacgtccttaaatcgaaaggctttacgatcgttgataccttgcatgtagaggatagcagcgtcaagccactcgtctcgaagaatttcaataagaaagtggtggagaagatgggactggtgtatcttgttcaatactctccggaccagtttaaaagttccaacattgcgaagaaagaactcagaaaagaattgatggatctgggctttaaagtccgctatataagcgaaaattacaagatgatggcgatcgaaggtacagccactcttcaggcagtacaccctaaccaaaactggcattataatatgattaaagctccggaagcgtgggctattacgtctggatcctctagcgttaaagtagcagtcctggatacagggatcgaccataatcacccatccttggccaacttcgtgaatactaatcttggccggtcgtttgttggaggaaacaccatggatgttcaaggtcatggcacacatgttgctggcacgattgcatcttatgggtgggtaagcggagtgatgcagagtgcgacactgatcccggtcaaagtgctcgataattctggcagcgggtccctttacggtattacgcaaggcatattgtatgccgccgacatcgatgcggacgtcattaacatgtctctgggtggaggaggctataatcagagcatggatgaggctgttcaaacagcagttgctcagggaaccattgtagtagcagcgactggcaatgatggtgcatcgtcgatcagttatcctgctgcctacagcagcgtcattgcggtgggatctgtgacgtccaatcgtacacgatcctcgttttctaactatggatctgggcttgaagttatggcaccgggcagcaacatctacagtacgtatcctaattccagatatacatctttgagtggtacaagcatggctactccgcacgttgcgggcgtagctgggctcattcgcgcagccaacccagacatatctgtcgcgcaagcccgtcagattctgcgggataccgcgcaagaagcaggatcgttcacacagtacggctatggaatcgtcgatgctcatgccgccgttgttgctgcatccggtggtagcggcggc

SEQ ID NO: 1948 - protein, 413 aa, synthetic construct
  REGION 1..413: note = Variant of serine peptidase from Bacillus sinesaloumensis
MADQASQANGNQDVIEGELIVSVEPKNGKPDVSIQSAQSVTGQEDVLKSKGFTIVDTLHVEDSSVKPLVSKNFNKKVVEKMGLVYLVQYSPDQFKSSNIAKKELRKELMDLGFKVRYISENYKMMAIEGTATLQAVHPNQNWHYNMIKAPEAWAITSGSSSVKVAVLDTGIDHNHPSLANFVNTNLGRSFVGGNTMDVQGHGTHVAGTIASYGWVSGVMQSATLIPVKVLDNSGSGSLYGITQGILYAADIDADVINMSLGGGGYNQSMDEAVQTAVAQGTIVVAATGNDGASSISYPAAYSSVIAVGSVTSNRTRSSFSNYGSGLEVMAPGSNIYSTYPNSRYTSLSGTSMATPHVAGVAGLIRAANPDISVAQARQILRDTAQEAGSFTQYGYGIVDAHAAVVAASGGSGG

SEQ ID NO: 1949 - DNA, 1239 bp, synthetic construct
  misc_feature 1..1239: note = Variant of serine peptidase from Bacillus sinesaloumensis
  source 1..1239: mol_type = other DNA
atggcagatcaagctagtcaagctaatggaaaccaggacgtcattgaaggcgagctgatcgtttcagtggaaccgaagaacggtaaacctgatgtgagcattcaaagtgcacaatccgtaacagggcaggaagacgtccttaaatcgaaaggctttacgatcgttgataccttgcatgtagaggatagcagcgtcaagccactcgtctcgaagaatttcaataagaaagtggtggagaagatgggactggtgtatcttgttcaatactctccggaccagtttaaaagttccaacattgcgaagaaagaactcagaaaagaattgatggatctgggctttaaagtccgctatataagcgaaaattacaagatgatggcgatcgaaggtacagccactcttcaggcagtacaccctaaccaaaactggcattataatatgattaaagctccggaagcgtgggctattacgtctggatcctctagcgttaaagtagcagtcctggatacagggatcgaccataatcacccatccttggccaacttcgtgaatactaatcttggccggtcgtttgttggaggaaacaccatggatgttcaaggtcatggcacacatgttgctggcacgattgcatcttatgggagtgtaagcggagtgatgcagttggcgacactgatcccggtcaaagtgctcgataattctggcagcgggtccctttacggtattacgcaaggcatattgtatgccgccgacatcgatgcggacgtcattaacatgtctctgggtggaggaggctataatcagagcatggatgaggctgttcaaacagcagttgctcagggaaccattgtagtagcagcgactggcaatgatggtgcatcgtcgatcagttatcctgctgcctacagcagcgtcattgcggtgggatctgtgacgtccaatcgtacacgatcctcgttttctaactatggatctgggcttgaagttatggcaccgggcagcaacatctacagtacgtatcctaattccagatatacatctttgagtggtacaagcatggctactccgcacgttgcgggcgtagctgggctcattcgcgcagccaacccagacatatctgtcgcgcaagcccgtcagattctgcgggataccgcgcaagaagcaggatcgttcacacagtacggctatggaatcgtcgatgctcatgccgccgttgttgctgcatccggtggtagcggcggc

SEQ ID NO: 1950 - protein, 413 aa, synthetic construct
  REGION 1..413: note = Variant of serine peptidase from Bacillus sinesaloumensis
MADQASQANGNQDVIEGELIVSVEPKNGKPDVSIQSAQSVTGQEDVLKSKGFTIVDTLHVEDSSVKPLVSKNFNKKVVEKMGLVYLVQYSPDQFKSSNIAKKELRKELMDLGFKVRYISENYKMMAIEGTATLQAVHPNQNWHYNMIKAPEAWAITSGSSSVKVAVLDTGIDHNHPSLANFVNTNLGRSFVGGNTMDVQGHGTHVAGTIASYGSVSGVMQLATLIPVKVLDNSGSGSLYGITQGILYAADIDADVINMSLGGGGYNQSMDEAVQTAVAQGTIVVAATGNDGASSISYPAAYSSVIAVGSVTSNRTRSSFSNYGSGLEVMAPGSNIYSTYPNSRYTSLSGTSMATPHVAGVAGLIRAANPDISVAQARQILRDTAQEAGSFTQYGYGIVDAHAAVVAASGGSGG

SEQ ID NO: 1951 - DNA, 1239 bp, synthetic construct
  misc_feature 1..1239: note = Variant of serine peptidase from Bacillus sinesaloumensis
  source 1..1239: mol_type = other DNA
atggcagatcaagctagtcaagctaatggaaaccaggacgtcattgaaggcgagctgatcgtttcagtggaaccgaagaacggtaaacctgatgtgagcattcaaagtgcacaatccgtaacagggcaggaagacgtccttaaatcgaaaggctttacgatcgttgataccttgcatgtagaggatagcagcgtcaagccactcgtctcgaagaatttcaataagaaagtggtggagaagatgggactggtgtatcttgttcaatactctccggaccagtttaaaagttccaacattgcgaagaaagaactcagaaaagaattgatggatctgggctttaaagtccgctatataagcgaaaattacaagatgatggcgatcgaaggtacagccactcttcaggcagtacaccctaaccaaaactggcattataatatgattaaagctccggaagcgtgggctattacgtctggatcctctagcgttaaagtagcagtcctggatacagggatcgaccataatcacccatccttggccaacttcgtgaatactaatcttggccggtcgtttgttggaggaaacaccatggatgttcaaggtcatggcacacatgttgctggcacgattgcatcttatgggagtgtaagcggagtgatgcagacggcgacactgatcccggtcaaagtgctcgataattctggcagcgggtccctttacggtattacgcaaggcatattgtatgccgccgacatcgatgcggacgtcattaacatgtctctgggtggaggaggctataatcagagcatggatgaggctgttcaaacagcagttgctcagggaaccattgtagtagcagcgactggcaatgatggtgcatcgtcgatcagttatcctgctgcctacagcagcgtcattgcggtgggatctgtgacgtccaatcgtacacgatcctcgttttctaactatggatctgggcttgaagttatggcaccgggcagcaacatctacagtacgtatcctaattccagatatacatctttgagtggtacaagcatggctactccgcacgttgcgggcgtagctgggctcattcgcgcagccaacccagacatatctgtcgcgcaagcccgtcagattctgcgggataccgcgcaagaagcaggatcgttcacacagtacggctatggaatcgtcgatgctcatgccgccgttgttgctgcatccggtggtagcggcggc

SEQ ID NO: 1952 - protein, 413 aa, synthetic construct
  REGION 1..413: note = Variant of serine peptidase from Bacillus sinesaloumensis
MADQASQANGNQDVIEGELIVSVEPKNGKPDVSIQSAQSVTGQEDVLKSKGFTIVDTLHVEDSSVKPLVSKNFNKKVVEKMGLVYLVQYSPDQFKSSNIAKKELRKELMDLGFKVRYISENYKMMAIEGTATLQAVHPNQNWHYNMIKAPEAWAITSGSSSVKVAVLDTGIDHNHPSLANFVNTNLGRSFVGGNTMDVQGHGTHVAGTIASYGSVSGVMQTATLIPVKVLDNSGSGSLYGITQGILYAADIDADVINMSLGGGGYNQSMDEAVQTAVAQGTIVVAATGNDGASSISYPAAYSSVIAVGSVTSNRTRSSFSNYGSGLEVMAPGSNIYSTYPNSRYTSLSGTSMATPHVAGVAGLIRAANPDISVAQARQILRDTAQEAGSFTQYGYGIVDAHAAVVAASGGSGG

SEQ ID NO: 1953 - DNA, 1239 bp, synthetic construct
  misc_feature 1..1239: note = Variant of serine peptidase from Bacillus sinesaloumensis
  source 1..1239: mol_type = other DNA
atggcagatcaagctagtcaagctaatggaaaccaggacgtcattgaaggcgagctgatcgtttcagtggaaccgaagaacggtaaacctgatgtgagcattcaaagtgcacaatccgtaacagggcaggaagacgtccttaaatcgaaaggctttacgatcgttgataccttgcatgtagaggatagcagcgtcaagccactcgtctcgaagaatttcaataagaaagtggtggagaagatgggactggtgtatcttgttcaatactctccggaccagtttaaaagttccaacattgcgaagaaagaactcagaaaagaattgatggatctgggctttaaagtccgctatataagcgaaaattacaagatgatggcgatcgaaggtacagccactcttcaggcagtacaccctaaccaaaactggcattataatatgattaaagctccggaagcgtgggctattacgtctggatcctctagcgttaaagtagcagtcctggatacagggatcgaccataatcacccatccttggccaacttcgtgaatactaatcttggccggtcgtttgttggaggaaacaccatggatgttcaaggtcatggcacacatgttgctggcacgattgcatcttatgggagtgtaagcggagtgatgcagattgcgacactgatcccggtcaaagtgctcgataattctggcagcgggtccctttacggtattacgcaaggcatattgtatgccgccgacatcgatgcggacgtcattaacatgtctctgggtggaggaggctataatcagagcatggatgaggctgttcaaacagcagttgctcagggaaccattgtagtagcagcgactggcaatgatggtgcatcgtcgatcagttatcctgctgcctacagcagcgtcattgcggtgggatctgtgacgtccaatcgtacacgatcctcgttttctaactatggatctgggcttgaagttatggcaccgggcagcaacatctacagtacgtatcctaattccagatatacatctttgagtggtacaagcatggctactccgcacgttgcgggcgtagctgggctcattcgcgcagccaacccagacatatctgtcgcgcaagcccgtcagattctgcgggataccgcgcaagaagcaggatcgttcacacagtacggctatggaatcgtcgatgctcatgccgccgttgttgctgcatccggtggtagcggcggc

SEQ ID NO: 1954 - protein, 413 aa, synthetic construct
  REGION 1..413: note = Variant of serine peptidase from Bacillus sinesaloumensis
MADQASQANGNQDVIEGELIVSVEPKNGKPDVSIQSAQSVTGQEDVLKSKGFTIVDTLHVEDSSVKPLVSKNFNKKVVEKMGLVYLVQYSPDQFKSSNIAKKELRKELMDLGFKVRYISENYKMMAIEGTATLQAVHPNQNWHYNMIKAPEAWAITSGSSSVKVAVLDTGIDHNHPSLANFVNTNLGRSFVGGNTMDVQGHGTHVAGTIASYGSVSGVMQIATLIPVKVLDNSGSGSLYGITQGILYAADIDADVINMSLGGGGYNQSMDEAVQTAVAQGTIVVAATGNDGASSISYPAAYSSVIAVGSVTSNRTRSSFSNYGSGLEVMAPGSNIYSTYPNSRYTSLSGTSMATPHVAGVAGLIRAANPDISVAQARQILRDTAQEAGSFTQYGYGIVDAHAAVVAASGGSGG

SEQ ID NO: 1955 - DNA, 1239 bp, synthetic construct
  misc_feature 1..1239: note = Variant of serine peptidase from Bacillus sinesaloumensis
  source 1..1239: mol_type = other DNA
atggcagatcaagctagtcaagctaatggaaaccaggacgtcattgaaggcgagctgatcgtttcagtggaaccgaagaacggtaaacctgatgtgagcattcaaagtgcacaatccgtaacagggcaggaagacgtccttaaatcgaaaggctttacgatcgttgataccttgcatgtagaggatagcagcgtcaagccactcgtctcgaagaatttcaataagaaagtggtggagaagatgggactggtgtatcttgttcaatactctccggaccagtttaaaagttccaacattgcgaagaaagaactcagaaaagaattgatggatctgggctttaaagtccgctatataagcgaaaattacaagatgatggcgatcgaaggtacagccactcttcaggcagtacaccctaaccaaaactggcattataatatgattaaagctccggaagcgtgggctattacgtctggatcctctagcgttaaagtagcagtcctggatacagggatcgaccataatcacccatccttggccaacttcgtgaatactaatcttggccggtcgtttgttggaggaaacaccatggatgttcaaggtcatggcacacatgttgctggcacgattgcatcttatgggagtgtaagcggagtgatgcagcgggcgacactgatcccggtcaaagtgctcgataattctggcagcgggtccctttacggtattacgcaaggcatattgtatgccgccgacatcgatgcggacgtcattaacatgtctctgggtggaggaggctataatcagagcatggatgaggctgttcaaacagcagttgctcagggaaccattgtagtagcagcgactggcaatgatggtgcatcgtcgatcagttatcctgctgcctacagcagcgtcattgcggtgggatctgtgacgtccaatcgtacacgatcctcgttttctaactatggatctgggcttgaagttatggcaccgggcagcaacatctacagtacgtatcctaattccagatatacatctttgagtggtacaagcatggctactccgcacgttgcgggcgtagctgggctcattcgcgcagccaacccagacatatctgtcgcgcaagcccgtcagattctgcgggataccgcgcaagaagcaggatcgttcacacagtacggctatggaatcgtcgatgctcatgccgccgttgttgctgcatccggtggtagcggcggc

SEQ ID NO: 1956 - protein, 413 aa, synthetic construct
  REGION 1..413: note = Variant of serine peptidase from Bacillus sinesaloumensis
MADQASQANGNQDVIEGELIVSVEPKNGKPDVSIQSAQSVTGQEDVLKSKGFTIVDTLHVEDSSVKPLVSKNFNKKVVEKMGLVYLVQYSPDQFKSSNIAKKELRKELMDLGFKVRYISENYKMMAIEGTATLQAVHPNQNWHYNMIKAPEAWAITSGSSSVKVAVLDTGIDHNHPSLANFVNTNLGRSFVGGNTMDVQGHGTHVAGTIASYGSVSGVMQRATLIPVKVLDNSGSGSLYGITQGILYAADIDADVINMSLGGGGYNQSMDEAVQTAVAQGTIVVAATGNDGASSISYPAAYSSVIAVGSVTSNRTRSSFSNYGSGLEVMAPGSNIYSTYPNSRYTSLSGTSMATPHVAGVAGLIRAANPDISVAQARQILRDTAQEAGSFTQYGYGIVDAHAAVVAASGGSGG

SEQ ID NO: 1957 - DNA, 1239 bp, synthetic construct
  misc_feature 1..1239: note = Variant of serine peptidase from Bacillus sinesaloumensis
  source 1..1239: mol_type = other DNA
atggcagatcaagctagtcaagctaatggaaaccaggacgtcattgaaggcgagctgatcgtttcagtggaaccgaagaacggtaaacctgatgtgagcattcaaagtgcacaatccgtaacagggcaggaagacgtccttaaatcgaaaggctttacgatcgttgataccttgcatgtagaggatagcagcgtcaagccactcgtctcgaagaatttcaataagaaagtggtggagaagatgggactggtgtatcttgttcaatactctccggaccagtttaaaagttccaacattgcgaagaaagaactcagaaaagaattgatggatctgggctttaaagtccgctatataagcgaaaattacaagatgatggcgatcgaaggtacagccactcttcaggcagtacaccctaaccaaaactggcattataatatgattaaagctccggaagcgtgggctattacgtctggatcctctagcgttaaagtagcagtcctggatacagggatcgaccataatcacccatccttggccaacttcgtgaatactaatcttggccggtcgtttgttggaggaaacaccatggatgttcaaggtcatggcacacatgttgctggcacgattgcatcttatgggagtgtaagcggagtgatgcaggatgcgacactgatcccggtcaaagtgctcgataattctggcagcgggtccctttacggtattacgcaaggcatattgtatgccgccgacatcgatgcggacgtcattaacatgtctctgggtggaggaggctataatcagagcatggatgaggctgttcaaacagcagttgctcagggaaccattgtagtagcagcgactggcaatgatggtgcatcgtcgatcagttatcctgctgcctacagcagcgtcattgcggtgggatctgtgacgtccaatcgtacacgatcctcgttttctaactatggatctgggcttgaagttatggcaccgggcagcaacatctacagtacgtatcctaattccagatatacatctttgagtggtacaagcatggctactccgcacgttgcgggcgtagctgggctcattcgcgcagccaacccagacatatctgtcgcgcaagcccgtcagattctgcgggataccgcgcaagaagcaggatcgttcacacagtacggctatggaatcgtcgatgctcatgccgccgttgttgctgcatccggtggtagcggcggc

SEQ ID NO: 1958 - protein, 413 aa, synthetic construct
  REGION 1..413: note = Variant of serine peptidase from Bacillus sinesaloumensis
MADQASQANGNQDVIEGELIVSVEPKNGKPDVSIQSAQSVTGQEDVLKSKGFTIVDTLHVEDSSVKPLVSKNFNKKVVEKMGLVYLVQYSPDQFKSSNIAKKELRKELMDLGFKVRYISENYKMMAIEGTATLQAVHPNQNWHYNMIKAPEAWAITSGSSSVKVAVLDTGIDHNHPSLANFVNTNLGRSFVGGNTMDVQGHGTHVAGTIASYGSVSGVMQDATLIPVKVLDNSGSGSLYGITQGILYAADIDADVINMSLGGGGYNQSMDEAVQTAVAQGTIVVAATGNDGASSISYPAAYSSVIAVGSVTSNRTRSSFSNYGSGLEVMAPGSNIYSTYPNSRYTSLSGTSMATPHVAGVAGLIRAANPDISVAQARQILRDTAQEAGSFTQYGYGIVDAHAAVVAASGGSGG

SEQ ID NO: 1959 - DNA, 1239 bp, synthetic construct
  misc_feature 1..1239: note = Variant of serine peptidase from Bacillus sinesaloumensis
  source 1..1239: mol_type = other DNA
atggcagatcaagctagtcaagctaatggaaaccaggacgtcattgaaggcgagctgatcgtttcagtggaaccgaagaacggtaaacctgatgtgagcattcaaagtgcacaatccgtaacagggcaggaagacgtccttaaatcgaaaggctttacgatcgttgataccttgcatgtagaggatagcagcgtcaagccactcgtctcgaagaatttcaataagaaagtggtggagaagatgggactggtgtatcttgttcaatactctccggaccagtttaaaagttccaacattgcgaagaaagaactcagaaaagaattgatggatctgggctttaaagtccgctatataagcgaaaattacaagatgatggcgatcgaaggtacagccactcttcaggcagtacaccctaaccaaaactggcattataatatgattaaagctccggaagcgtgggctattacgtctggatcctctagcgttaaagtagcagtcctggatacagggatcgaccataatcacccatccttggccaacttcgtgaatactaatcttggccggtcgtttgttggaggaaacaccatggatgttcaaggtcatggcacacatgttgctggcacgattgcatcttatgggagtgtaagcggagtgatgcaggctgcgacactgatcccggtcaaagtgctcgataattctggcagcgggtccctttacggtattacgcaaggcatattgtatgccgccgacatcgatgcggacgtcattaacatgtctctgggtggaggaggctataatcagagcatggatgaggctgttcaaacagcagttgctcagggaaccattgtagtagcagcgactggcaatgatggtgcatcgtcgatcagttatcctgctgcctacagcagcgtcattgcggtgggatctgtgacgtccaatcgtacacgatcctcgttttctaactatggatctgggcttgaagttatggcaccgggcagcaacatctacagtacgtatcctaattccagatatacatctttgagtggtacaagcatggctactccgcacgttgcgggcgtagctgggctcattcgcgcagccaacccagacatatctgtcgcgcaagcccgtcagattctgcgggataccgcgcaagaagcaggatcgttcacacagtacggctatggaatcgtcgatgctcatgccgccgttgttgctgcatccggtggtagcggcggc

SEQ ID NO: 1960 - protein, 413 aa, synthetic construct
  REGION 1..413: note = Variant of serine peptidase from Bacillus sinesaloumensis
MADQASQANGNQDVIEGELIVSVEPKNGKPDVSIQSAQSVTGQEDVLKSKGFTIVDTLHVEDSSVKPLVSKNFNKKVVEKMGLVYLVQYSPDQFKSSNIAKKELRKELMDLGFKVRYISENYKMMAIEGTATLQAVHPNQNWHYNMIKAPEAWAITSGSSSVKVAVLDTGIDHNHPSLANFVNTNLGRSFVGGNTMDVQGHGTHVAGTIASYGSVSGVMQAATLIPVKVLDNSGSGSLYGITQGILYAADIDADVINMSLGGGGYNQSMDEAVQTAVAQGTIVVAATGNDGASSISYPAAYSSVIAVGSVTSNRTRSSFSNYGSGLEVMAPGSNIYSTYPNSRYTSLSGTSMATPHVAGVAGLIRAANPDISVAQARQILRDTAQEAGSFTQYGYGIVDAHAAVVAASGGSGG

SEQ ID NO: 1961 - DNA, 1239 bp, synthetic construct
  misc_feature 1..1239: note = Variant of serine peptidase from Bacillus sinesaloumensis
  source 1..1239: mol_type = other DNA
atggcagatcaagctagtcaagctaatggaaaccaggacgtcattgaaggcgagctgatcgtttcagtggaaccgaagaacggtaaacctgatgtgagcattcaaagtgcacaatccgtaacagggcaggaagacgtccttaaatcgaaaggctttacgatcgttgataccttgcatgtagaggatagcagcgtcaagccactcgtctcgaagaatttcaataagaaagtggtggagaagatgggactggtgtatcttgttcaatactctccggaccagtttaaaagttccaacattgcgaagaaagaactcagaaaagaattgatggatctgggctttaaagtccgctatataagcgaaaattacaagatgatggcgatcgaaggtacagccactcttcaggcagtacaccctaaccaaaactggcattataatatgattaaagctccggaagcgtgggctattacgtctggatcctctagcgttaaagtagcagtcctggatacagggatcgaccataatcacccatccttggccaacttcgtgaatactaatcttggccggtcgtttgttggaggaaacaccatggatgttcaaggtcatggcacacatgttgctggcacgattgcatcttatgggagtgtaagcggagtgatgcagtgtgcgacactgatcccggtcaaagtgctcgataattctggcagcgggtccctttacggtattacgcaaggcatattgtatgccgccgacatcgatgcggacgtcattaacatgtctctgggtggaggaggctataatcagagcatggatgaggctgttcaaacagcagttgctcagggaaccattgtagtagcagcgactggcaatgatggtgcatcgtcgatcagttatcctgctgcctacagcagcgtcattgcggtgggatctgtgacgtccaatcgtacacgatcctcgttttctaactatggatctgggcttgaagttatggcaccgggcagcaacatctacagtacgtatcctaattccagatatacatctttgagtggtacaagcatggctactccgcacgttgcgggcgtagctgggctcattcgcgcagccaacccagacatatctgtcgcgcaagcccgtcagattctgcgggataccgcgcaagaagcaggatcgttcacacagtacggctatggaatcgtcgatgctcatgccgccgttgttgctgcatccggtggtagcggcggc

SEQ ID NO: 1962 - protein, 413 aa, synthetic construct
  REGION 1..413: note = Variant of serine peptidase from Bacillus sinesaloumensis
MADQASQANGNQDVIEGELIVSVEPKNGKPDVSIQSAQSVTGQEDVLKSKGFTIVDTLHVEDSSVKPLVSKNFNKKVVEKMGLVYLVQYSPDQFKSSNIAKKELRKELMDLGFKVRYISENYKMMAIEGTATLQAVHPNQNWHYNMIKAPEAWAITSGSSSVKVAVLDTGIDHNHPSLANFVNTNLGRSFVGGNTMDVQGHGTHVAGTIASYGSVSGVMQCATLIPVKVLDNSGSGSLYGITQGILYAADIDADVINMSLGGGGYNQSMDEAVQTAVAQGTIVVAATGNDGASSISYPAAYSSVIAVGSVTSNRTRSSFSNYGSGLEVMAPGSNIYSTYPNSRYTSLSGTSMATPHVAGVAGLIRAANPDISVAQARQILRDTAQEAGSFTQYGYGIVDAHAAVVAASGGSGG

SEQ ID NO: 1963 - DNA, 1239 bp, synthetic construct
  misc_feature 1..1239: note = Variant of serine peptidase from Bacillus sinesaloumensis
  source 1..1239: mol_type = other DNA
atggcagatcaagctagtcaagctaatggaaaccaggacgtcattgaaggcgagctgatcgtttcagtggaaccgaagaacggtaaacctgatgtgagcattcaaagtgcacaatccgtaacagggcaggaagacgtccttaaatcgaaaggctttacgatcgttgataccttgcatgtagaggatagcagcgtcaagccactcgtctcgaagaatttcaataagaaagtggtggagaagatgggactggtgtatcttgttcaatactctccggaccagtttaaaagttccaacattgcgaagaaagaactcagaaaagaattgatggatctgggctttaaagtccgctatataagcgaaaattacaagatgatggcgatcgaaggtacagccactcttcaggcagtacaccctaaccaaaactggcattataatatgattaaagctccggaagcgtgggctattacgtctggatcctctagcgttaaagtagcagtcctggatacagggatcgaccataatcacccatccttggccaacttcgtgaatactaatcttggccggtcgtttgttggaggaaacaccatggatgttcaaggtcatggcacacatgttgctggcacgattgcatcttatgggagtgtaagcggagtgatgcaggtggcgacactgatcccggtcaaagtgctcgataattctggcagcgggtccctttacggtattacgcaaggcatattgtatgccgccgacatcgatgcggacgtcattaacatgtctctgggtggaggaggctataatcagagcatggatgaggctgttcaaacagcagttgctcagggaaccattgtagtagcagcgactggcaatgatggtgcatcgtcgatcagttatcctgctgcctacagcagcgtcattgcggtgggatctgtgacgtccaatcgtacacgatcctcgttttctaactatggatctgggcttgaagttatggcaccgggcagcaacatctacagtacgtatcctaattccagatatacatctttgagtggtacaagcatggctactccgcacgttgcgggcgtagctgggctcattcgcgcagccaacccagacatatctgtcgcgcaagcccgtcagattctgcgggataccgcgcaagaagcaggatcgttcacacagtacggctatggaatcgtcgatgctcatgccgccgttgttgctgcatccggtggtagcggcggc

SEQ ID NO: 1964 - protein, 413 aa, synthetic construct
  REGION 1..413: note = Variant of serine peptidase from Bacillus sinesaloumensis
MADQASQANGNQDVIEGELIVSVEPKNGKPDVSIQSAQSVTGQEDVLKSKGFTIVDTLHVEDSSVKPLVSKNFNKKVVEKMGLVYLVQYSPDQFKSSNIAKKELRKELMDLGFKVRYISENYKMMAIEGTATLQAVHPNQNWHYNMIKAPEAWAITSGSSSVKVAVLDTGIDHNHPSLANFVNTNLGRSFVGGNTMDVQGHGTHVAGTIASYGSVSGVMQVATLIPVKVLDNSGSGSLYGITQGILYAADIDADVINMSLGGGGYNQSMDEAVQTAVAQGTIVVAATGNDGASSISYPAAYSSVIAVGSVTSNRTRSSFSNYGSGLEVMAPGSNIYSTYPNSRYTSLSGTSMATPHVAGVAGLIRAANPDISVAQARQILRDTAQEAGSFTQYGYGIVDAHAAVVAASGGSGG

SEQ ID NO: 1965 - DNA, 1239 bp, synthetic construct
  misc_feature 1..1239: note = Variant of serine peptidase from Bacillus sinesaloumensis
  source 1..1239: mol_type = other DNA
atggcagatcaagctagtcaagctaatggaaaccaggacgtcattgaaggcgagctgatcgtttcagtggaaccgaagaacggtaaacctgatgtgagcattcaaagtgcacaatccgtaacagggcaggaagacgtccttaaatcgaaaggctttacgatcgttgataccttgcatgtagaggatagcagcgtcaagccactcgtctcgaagaatttcaataagaaagtggtggagaagatgggactggtgtatcttgttcaatactctccggaccagtttaaaagttccaacattgcgaagaaagaactcagaaaagaattgatggatctgggctttaaagtccgctatataagcgaaaattacaagatgatggcgatcgaaggtacagccactcttcaggcagtacaccctaaccaaaactggcattataatatgattaaagctccggaagcgtgggctattacgtctggatcctctagcgttaaagtagcagtcctggatacagggatcgaccataatcacccatccttggccaacttcgtgaatactaatcttggccggtcgtttgttggaggaaacaccatggatgttcaaggtcatggcacacatgttgctggcacgattgcatcttatgggagtgtaagcggagtgatgcagtttgcgacactgatcccggtcaaagtgctcgataattctggcagcgggtccctttacggtattacgcaaggcatattgtatgccgccgacatcgatgcggacgtcattaacatgtctctgggtggaggaggctataatcagagcatggatgaggctgttcaaacagcagttgctcagggaaccattgtagtagcagcgactggcaatgatggtgcatcgtcgatcagttatcctgctgcctacagcagcgtcattgcggtgggatctgtgacgtccaatcgtacacgatcctcgttttctaactatggatctgggcttgaagttatggcaccgggcagcaacatctacagtacgtatcctaattccagatatacatctttgagtggtacaagcatggctactccgcacgttgcgggcgtagctgggctcattcgcgcagccaacccagacatatctgtcgcgcaagcccgtcagattctgcgggataccgcgcaagaagcaggatcgttcacacagtacggctatggaatcgtcgatgctcatgccgccgttgttgctgcatccggtggtagcggcggc

SEQ ID NO: 1966 - protein, 413 aa, synthetic construct
  REGION 1..413: note = Variant of serine peptidase from Bacillus sinesaloumensis
MADQASQANGNQDVIEGELIVSVEPKNGKPDVSIQSAQSVTGQEDVLKSKGFTIVDTLHVEDSSVKPLVSKNFNKKVVEKMGLVYLVQYSPDQFKSSNIAKKELRKELMDLGFKVRYISENYKMMAIEGTATLQAVHPNQNWHYNMIKAPEAWAITSGSSSVKVAVLDTGIDHNHPSLANFVNTNLGRSFVGGNTMDVQGHGTHVAGTIASYGSVSGVMQFATLIPVKVLDNSGSGSLYGITQGILYAADIDADVINMSLGGGGYNQSMDEAVQTAVAQGTIVVAATGNDGASSISYPAAYSSVIAVGSVTSNRTRSSFSNYGSGLEVMAPGSNIYSTYPNSRYTSLSGTSMATPHVAGVAGLIRAANPDISVAQARQILRDTAQEAGSFTQYGYGIVDAHAAVVAASGGSGG

SEQ ID NO: 1967 - DNA, 1239 bp, synthetic construct
  misc_feature 1..1239: note = Variant of serine peptidase from Bacillus sinesaloumensis
  source 1..1239: mol_type = other DNA
atggcagatcaagctagtcaagctaatggaaaccaggacgtcattgaaggcgagctgatcgtttcagtggaaccgaagaacggtaaacctgatgtgagcattcaaagtgcacaatccgtaacagggcaggaagacgtccttaaatcgaaaggctttacgatcgttgataccttgcatgtagaggatagcagcgtcaagccactcgtctcgaagaatttcaataagaaagtggtggagaagatgggactggtgtatcttgttcaatactctccggaccagtttaaaagttccaacattgcgaagaaagaactcagaaaagaattgatggatctgggctttaaagtccgctatataagcgaaaattacaagatgatggcgatcgaaggtacagccactcttcaggcagtacaccctaaccaaaactggcattataatatgattaaagctccggaagcgtgggctattacgtctggatcctctagcgttaaagtagcagtcctggatacagggatcgaccataatcacccatccttggccaacttcgtgaatactaatcttggccggtcgtttgttggaggaaacaccatggatgttcaaggtcatggcacacatgttgctggcacgattgcatcttatgggagtgtaagcggagtgatgcagggggcgacactgatcccggtcaaagtgctcgataattctggcagcgggtccctttacggtattacgcaaggcatattgtatgccgccgacatcgatgcggacgtcattaacatgtctctgggtggaggaggctataatcagagcatggatgaggctgttcaaacagcagttgctcagggaaccattgtagtagcagcgactggcaatgatggtgcatcgtcgatcagttatcctgctgcctacagcagcgtcattgcggtgggatctgtgacgtccaatcgtacacgatcctcgttttctaactatggatctgggcttgaagttatggcaccgggcagcaacatctacagtacgtatcctaattccagatatacatctttgagtggtacaagcatggctactccgcacgttgcgggcgtagctgggctcattcgcgcagccaacccagacatatctgtcgcgcaagcccgtcagattctgcgggataccgcgcaagaagcaggatcgttcacacagtacggctatggaatcgtcgatgctcatgccgccgttgttgctgcatccggtggtagcggcggc

SEQ ID NO: 1968 - protein, 413 aa, synthetic construct
  REGION 1..413: note = Variant of serine peptidase from Bacillus sinesaloumensis
MADQASQANGNQDVIEGELIVSVEPKNGKPDVSIQSAQSVTGQEDVLKSKGFTIVDTLHVEDSSVKPLVSKNFNKKVVEKMGLVYLVQYSPDQFKSSNIAKKELRKELMDLGFKVRYISENYKMMAIEGTATLQAVHPNQNWHYNMIKAPEAWAITSGSSSVKVAVLDTGIDHNHPSLANFVNTNLGRSFVGGNTMDVQGHGTHVAGTIASYGSVSGVMQGATLIPVKVLDNSGSGSLYGITQGILYAADIDADVINMSLGGGGYNQSMDEAVQTAVAQGTIVVAATGNDGASSISYPAAYSSVIAVGSVTSNRTRSSFSNYGSGLEVMAPGSNIYSTYPNSRYTSLSGTSMATPHVAGVAGLIRAANPDISVAQARQILRDTAQEAGSFTQYGYGIVDAHAAVVAASGGSGG

SEQ ID NO: 1969 - DNA, 1239 bp, synthetic construct
  misc_feature 1..1239: note = Variant of serine peptidase from Bacillus sinesaloumensis
  source 1..1239: mol_type = other DNA
atggcagatcaagctagtcaagctaatggaaaccaggacgtcattgaaggcgagctgatcgtttcagtggaaccgaagaacggtaaacctgatgtgagcattcaaagtgcacaatccgtaacagggcaggaagacgtccttaaatcgaaaggctttacgatcgttgataccttgcatgtagaggatagcagcgtcaagccactcgtctcgaagaatttcaataagaaagtggtggagaagatgggactggtgtatcttgttcaatactctccggaccagtttaaaagttccaacattgcgaagaaagaactcagaaaagaattgatggatctgggctttaaagtccgctatataagcgaaaattacaagatgatggcgatcgaaggtacagccactcttcaggcagtacaccctaaccaaaactggcattataatatgattaaagctccggaagcgtgggctattacgtctggatcctctagcgttaaagtagcagtcctggatacagggatcgaccataatcacccatccttggccaacttcgtgaatactaatcttggccggtcgtttgttggaggaaacaccatggatgttcaaggtcatggcacacatgttgctggcacgattgcatcttatgggagtgtaagcggagtgatgcagccggcgacactgatcccggtcaaagtgctcgataattctggcagcgggtccctttacggtattacgcaaggcatattgtatgccgccgacatcgatgcggacgtcattaacatgtctctgggtggaggaggctataatcagagcatggatgaggctgttcaaacagcagttgctcagggaaccattgtagtagcagcgactggcaatgatggtgcatcgtcgatcagttatcctgctgcctacagcagcgtcattgcggtgggatctgtgacgtccaatcgtacacgatcctcgttttctaactatggatctgggcttgaagttatggcaccgggcagcaacatctacagtacgtatcctaattccagatatacatctttgagtggtacaagcatggctactccgcacgttgcgggcgtagctgggctcattcgcgcagccaacccagacatatctgtcgcgcaagcccgtcagattctgcgggataccgcgcaagaagcaggatcgttcacacagtacggctatggaatcgtcgatgctcatgccgccgttgttgctgcatccggtggtagcggcggc

SEQ ID NO: 1970 - protein, 413 aa, synthetic construct
  REGION 1..413: note = Variant of serine peptidase from Bacillus sinesaloumensis
MADQASQANGNQDVIEGELIVSVEPKNGKPDVSIQSAQSVTGQEDVLKSKGFTIVDTLHVEDSSVKPLVSKNFNKKVVEKMGLVYLVQYSPDQFKSSNIAKKELRKELMDLGFKVRYISENYKMMAIEGTATLQAVHPNQNWHYNMIKAPEAWAITSGSSSVKVAVLDTGIDHNHPSLANFVNTNLGRSFVGGNTMDVQGHGTHVAGTIASYGSVSGVMQPATLIPVKVLDNSGSGSLYGITQGILYAADIDADVINMSLGGGGYNQSMDEAVQTAVAQGTIVVAATGNDGASSISYPAAYSSVIAVGSVTSNRTRSSFSNYGSGLEVMAPGSNIYSTYPNSRYTSLSGTSMATPHVAGVAGLIRAANPDISVAQARQILRDTAQEAGSFTQYGYGIVDAHAAVVAASGGSGG

SEQ ID NO: 1971 - DNA, 1239 bp, synthetic construct
  misc_feature 1..1239: note = Variant of serine peptidase from Bacillus sinesaloumensis
  source 1..1239: mol_type = other DNA
atggcagatcaagctagtcaagctaatggaaaccaggacgtcattgaaggcgagctgatcgtttcagtggaaccgaagaacggtaaacctgatgtgagcattcaaagtgcacaatccgtaacagggcaggaagacgtccttaaatcgaaaggctttacgatcgttgataccttgcatgtagaggatagcagcgtcaagccactcgtctcgaagaatttcaataagaaagtggtggagaagatgggactggtgtatcttgttcaatactctccggaccagtttaaaagttccaacattgcgaagaaagaactcagaaaagaattgatggatctgggctttaaagtccgctatataagcgaaaattacaagatgatggcgatcgaaggtacagccactcttcaggcagtacaccctaaccaaaactggcattataatatgattaaagctccggaagcgtgggctattacgtctggatcctctagcgttaaagtagcagtcctggatacagggatcgaccataatcacccatccttggccaacttcgtgaatactaatcttggccggtcgtttgttggaggaaacaccatggatgttcaaggtcatggcacacatgttgctggcacgattgcatcttatgggagtgtaagcggagtgatgcagaaggcgacactgatcccggtcaaagtgctcgataattctggcagcgggtccctttacggtattacgcaaggcatattgtatgccgccgacatcgatgcggacgtcattaacatgtctctgggtggaggaggctataatcagagcatggatgaggctgttcaaacagcagttgctcagggaaccattgtagtagcagcgactggcaatgatggtgcatcgtcgatcagttatcctgctgcctacagcagcgtcattgcggtgggatctgtgacgtccaatcgtacacgatcctcgttttctaactatggatctgggcttgaagttatggcaccgggcagcaacatctacagtacgtatcctaattccagatatacatctttgagtggtacaagcatggctactccgcacgttgcgggcgtagctgggctcattcgcgcagccaacccagacatatctgtcgcgcaagcccgtcagattctgcgggataccgcgcaagaagcaggatcgttcacacagtacggctatggaatcgtcgatgctcatgccgccgttgttgctgcatccggtggtagcggcggc

SEQ ID NO: 1972 - protein, 413 aa, synthetic construct
  REGION 1..413: note = Variant of serine peptidase from Bacillus sinesaloumensis
MADQASQANGNQDVIEGELIVSVEPKNGKPDVSIQSAQSVTGQEDVLKSKGFTIVDTLHVEDSSVKPLVSKNFNKKVVEKMGLVYLVQYSPDQFKSSNIAKKELRKELMDLGFKVRYISENYKMMAIEGTATLQAVHPNQNWHYNMIKAPEAWAITSGSSSVKVAVLDTGIDHNHPSLANFVNTNLGRSFVGGNTMDVQGHGTHVAGTIASYGSVSGVMQKATLIPVKVLDNSGSGSLYGITQGILYAADIDADVINMSLGGGGYNQSMDEAVQTAVAQGTIVVAATGNDGASSISYPAAYSSVIAVGSVTSNRTRSSFSNYGSGLEVMAPGSNIYSTYPNSRYTSLSGTSMATPHVAGVAGLIRAANPDISVAQARQILRDTAQEAGSFTQYGYGIVDAHAAVVAASGGSGG

SEQ ID NO: 1973 - DNA, 1239 bp, synthetic construct
  misc_feature 1..1239: note = Variant of serine peptidase from Bacillus sinesaloumensis
  source 1..1239: mol_type = other DNA
atggcagatcaagctagtcaagctaatggaaaccaggacgtcattgaaggcgagctgatcgtttcagtggaaccgaagaacggtaaacctgatgtgagcattcaaagtgcacaatccgtaacagggcaggaagacgtccttaaatcgaaaggctttacgatcgttgataccttgcatgtagaggatagcagcgtcaagccactcgtctcgaagaatttcaataagaaagtggtggagaagatgggactggtgtatcttgttcaatactctccggaccagtttaaaagttccaacattgcgaagaaagaactcagaaaagaattgatggatctgggctttaaagtccgctatataagcgaaaattacaagatgatggcgatcgaaggtacagccactcttcaggcagtacaccctaaccaaaactggcattataatatgattaaagctccggaagcgtgggctattacgtctggatcctctagcgttaaagtagcagtcctggatacagggatcgaccataatcacccatccttggccaacttcgtgaatactaatcttggccggtcgtttgttggaggaaacaccatggatgttcaaggtcatggcacacatgttgctggcacgattgcatcttatgggagtgtaagcggagtgatgcagtatgcgacactgatcccggtcaaagtgctcgataattctggcagcgggtccctttacggtattacgcaaggcatattgtatgccgccgacatcgatgcggacgtcattaacatgtctctgggtggaggaggctataatcagagcatggatgaggctgttcaaacagcagttgctcagggaaccattgtagtagcagcgactggcaatgatggtgcatcgtcgatcagttatcctgctgcctacagcagcgtcattgcggtgggatctgtgacgtccaatcgtacacgatcctcgttttctaactatggatctgggcttgaagttatggcaccgggcagcaacatctacagtacgtatcctaattccagatatacatctttgagtggtacaagcatggctactccgcacgttgcgggcgtagctgggctcattcgcgcagccaacccagacatatctgtcgcgcaagcccgtcagattctgcgggataccgcgcaagaagcaggatcgttcacacagtacggctatggaatcgtcgatgctcatgccgccgttgttgctgcatccggtggtagcggcggc

SEQ ID NO: 1974 - protein, 413 aa, synthetic construct
  REGION 1..413: note = Variant of serine peptidase from Bacillus sinesaloumensis
MADQASQANGNQDVIEGELIVSVEPKNGKPDVSIQSAQSVTGQEDVLKSKGFTIVDTLHVEDSSVKPLVSKNFNKKVVEKMGLVYLVQYSPDQFKSSNIAKKELRKELMDLGFKVRYISENYKMMAIEGTATLQAVHPNQNWHYNMIKAPEAWAITSGSSSVKVAVLDTGIDHNHPSLANFVNTNLGRSFVGGNTMDVQGHGTHVAGTIASYGSVSGVMQYATLIPVKVLDNSGSGSLYGITQGILYAADIDADVINMSLGGGGYNQSMDEAVQTAVAQGTIVVAATGNDGASSISYPAAYSSVIAVGSVTSNRTRSSFSNYGSGLEVMAPGSNIYSTYPNSRYTSLSGTSMATPHVAGVAGLIRAANPDISVAQARQILRDTAQEAGSFTQYGYGIVDAHAAVVAASGGSGG

SEQ ID NO: 1975 - DNA, 1239 bp, synthetic construct
  misc_feature 1..1239: note = Variant of serine peptidase from Bacillus sinesaloumensis
  source 1..1239: mol_type = other DNA
atggcagatcaagctagtcaagctaatggaaaccaggacgtcattgaaggcgagctgatcgtttcagtggaaccgaagaacggtaaacctgatgtgagcattcaaagtgcacaatccgtaacagggcaggaagacgtccttaaatcgaaaggctttacgatcgttgataccttgcatgtagaggatagcagcgtcaagccactcgtctcgaagaatttcaataagaaagtggtggagaagatgggactggtgtatcttgttcaatactctccggaccagtttaaaagttccaacattgcgaagaaagaactcagaaaagaattgatggatctgggctttaaagtccgctatataagcgaaaattacaagatgatggcgatcgaaggtacagccactcttcaggcagtacaccctaaccaaaactggcattataatatgattaaagctccggaagcgtgggctattacgtctggatcctctagcgttaaagtagcagtcctggatacagggatcgaccataatcacccatccttggccaacttcgtgaatactaatcttggccggtcgtttgttggaggaaacaccatggatgttcaaggtcatggcacacatgttgctggcacgattgcatcttatgggagtgtaagcggagtgatgcaggaggcgacactgatcccggtcaaagtgctcgataattctggcagcgggtccctttacggtattacgcaaggcatattgtatgccgccgacatcgatgcggacgtcattaacatgtctctgggtggaggaggctataatcagagcatggatgaggctgttcaaacagcagttgctcagggaaccattgtagtagcagcgactggcaatgatggtgcatcgtcgatcagttatcctgctgcctacagcagcgtcattgcggtgggatctgtgacgtccaatcgtacacgatcctcgttttctaactatggatctgggcttgaagttatggcaccgggcagcaacatctacagtacgtatcctaattccagatatacatctttgagtggtacaagcatggctactccgcacgttgcgggcgtagctgggctcattcgcgcagccaacccagacatatctgtcgcgcaagcccgtcagattctgcgggataccgcgcaagaagcaggatcgttcacacagtacggctatggaatcgtcgatgctcatgccgccgttgttgctgcatccggtggtagcggcggc

SEQ ID NO: 1976 - protein, 413 aa, synthetic construct
  REGION 1..413: note = Variant of serine peptidase from Bacillus sinesaloumensis
MADQASQANGNQDVIEGELIVSVEPKNGKPDVSIQSAQSVTGQEDVLKSKGFTIVDTLHVEDSSVKPLVSKNFNKKVVEKMGLVYLVQYSPDQFKSSNIAKKELRKELMDLGFKVRYISENYKMMAIEGTATLQAVHPNQNWHYNMIKAPEAWAITSGSSSVKVAVLDTGIDHNHPSLANFVNTNLGRSFVGGNTMDVQGHGTHVAGTIASYGSVSGVMQEATLIPVKVLDNSGSGSLYGITQGILYAADIDADVINMSLGGGGYNQSMDEAVQTAVAQGTIVVAATGNDGASSISYPAAYSSVIAVGSVTSNRTRSSFSNYGSGLEVMAPGSNIYSTYPNSRYTSLSGTSMATPHVAGVAGLIRAANPDISVAQARQILRDTAQEAGSFTQYGYGIVDAHAAVVAASGGSGG

SEQ ID NO: 1977 - DNA, 1239 bp, synthetic construct
  misc_feature 1..1239: note = Variant of serine peptidase from Bacillus sinesaloumensis
  source 1..1239: mol_type = other DNA
atggcagatcaagctagtcaagctaatggaaaccaggacgtcattgaaggcgagctgatcgtttcagtggaaccgaagaacggtaaacctgatgtgagcattcaaagtgcacaatccgtaacagggcaggaagacgtccttaaatcgaaaggctttacgatcgttgataccttgcatgtagaggatagcagcgtcaagccactcgtctcgaagaatttcaataagaaagtggtggagaagatgggactggtgtatcttgttcaatactctccggaccagtttaaaagttccaacattgcgaagaaagaactcagaaaagaattgatggatctgggctttaaagtccgctatataagcgaaaattacaagatgatggcgatcgaaggtacagccactcttcaggcagtacaccctaaccaaaactggcattataatatgattaaagctccggaagcgtgggctattacgtctggatcctctagcgttaaagtagcagtcctggatacagggatcgaccataatcacccatccttggccaacttcgtgaatactaatcttggccggtcgtttgttggaggaaacaccatggatgttcaaggtcatggcacacatgttgctggcacgattgcatcttatgggagtgtaagcggagtgatgcagcaggcgacactgatcccggtcaaagtgctcgataattctggcagcgggtccctttacggtattacgcaaggcatattgtatgccgccgacatcgatgcggacgtcattaacatgtctctgggtggaggaggctataatcagagcatggatgaggctgttcaaacagcagttgctcagggaaccattgtagtagcagcgactggcaatgatggtgcatcgtcgatcagttatcctgctgcctacagcagcgtcattgcggtgggatctgtgacgtccaatcgtacacgatcctcgttttctaactatggatctgggcttgaagttatggcaccgggcagcaacatctacagtacgtatcctaattccagatatacatctttgagtggtacaagcatggctactccgcacgttgcgggcgtagctgggctcattcgcgcagccaacccagacatatctgtcgcgcaagcccgtcagattctgcgggataccgcgcaagaagcaggatcgttcacacagtacggctatggaatcgtcgatgctcatgccgccgttgttgctgcatccggtggtagcggcggc

SEQ ID NO: 1978 - protein, 413 aa, synthetic construct
  REGION 1..413: note = Variant of serine peptidase from Bacillus sinesaloumensis
MADQASQANGNQDVIEGELIVSVEPKNGKPDVSIQSAQSVTGQEDVLKSKGFTIVDTLHVEDSSVKPLVSKNFNKKVVEKMGLVYLVQYSPDQFKSSNIAKKELRKELMDLGFKVRYISENYKMMAIEGTATLQAVHPNQNWHYNMIKAPEAWAITSGSSSVKVAVLDTGIDHNHPSLANFVNTNLGRSFVGGNTMDVQGHGTHVAGTIASYGSVSGVMQQATLIPVKVLDNSGSGSLYGITQGILYAADIDADVINMSLGGGGYNQSMDEAVQTAVAQGTIVVAATGNDGASSISYPAAYSSVIAVGSVTSNRTRSSFSNYGSGLEVMAPGSNIYSTYPNSRYTSLSGTSMATPHVAGVAGLIRAANPDISVAQARQILRDTAQEAGSFTQYGYGIVDAHAAVVAASGGSGG

SEQ ID NO: 1979 - DNA, 1239 bp, synthetic construct
  misc_feature 1..1239: note = Variant of serine peptidase from Bacillus sinesaloumensis
  source 1..1239: mol_type = other DNA
atggcagatcaagctagtcaagctaatggaaaccaggacgtcattgaaggcgagctgatcgtttcagtggaaccgaagaacggtaaacctgatgtgagcattcaaagtgcacaatccgtaacagggcaggaagacgtccttaaatcgaaaggctttacgatcgttgataccttgcatgtagaggatagcagcgtcaagccactcgtctcgaagaatttcaataagaaagtggtggagaagatgggactggtgtatcttgttcaatactctccggaccagtttaaaagttccaacattgcgaagaaagaactcagaaaagaattgatggatctgggctttaaagtccgctatataagcgaaaattacaagatgatggcgatcgaaggtacagccactcttcaggcagtacaccctaaccaaaactggcattataatatgattaaagctccggaagcgtgggctattacgtctggatcctctagcgttaaagtagcagtcctggatacagggatcgaccataatcacccatccttggccaacttcgtgaatactaatcttggccggtcgtttgttggaggaaacaccatggatgttcaaggtcatggcacacatgttgctggcacgattgcatcttatgggagtgtaagcggagtgatgcagatggcgacactgatcccggtcaaagtgctcgataattctggcagcgggtccctttacggtattacgcaaggcatattgtatgccgccgacatcgatgcggacgtcattaacatgtctctgggtggaggaggctataatcagagcatggatgaggctgttcaaacagcagttgctcagggaaccattgtagtagcagcgactggcaatgatggtgcatcgtcgatcagttatcctgctgcctacagcagcgtcattgcggtgggatctgtgacgtccaatcgtacacgatcctcgttttctaactatggatctgggcttgaagttatggcaccgggcagcaacatctacagtacgtatcctaattccagatatacatctttgagtggtacaagcatggctactccgcacgttgcgggcgtagctgggctcattcgcgcagccaacccagacatatctgtcgcgcaagcccgtcagattctgcgggataccgcgcaagaagcaggatcgttcacacagtacggctatggaatcgtcgatgctcatgccgccgttgttgctgcatccggtggtagcggcggc

SEQ ID NO: 1980 - protein, 413 aa, synthetic construct
  REGION 1..413: note = Variant of serine peptidase from Bacillus sinesaloumensis
MADQASQANGNQDVIEGELIVSVEPKNGKPDVSIQSAQSVTGQEDVLKSKGFTIVDTLHVEDSSVKPLVSKNFNKKVVEKMGLVYLVQYSPDQFKSSNIAKKELRKELMDLGFKVRYISENYKMMAIEGTATLQAVHPNQNWHYNMIKAPEAWAITSGSSSVKVAVLDTGIDHNHPSLANFVNTNLGRSFVGGNTMDVQGHGTHVAGTIASYGSVSGVMQMATLIPVKVLDNSGSGSLYGITQGILYAADIDADVINMSLGGGGYNQSMDEAVQTAVAQGTIVVAATGNDGASSISYPAAYSSVIAVGSVTSNRTRSSFSNYGSGLEVMAPGSNIYSTYPNSRYTSLSGTSMATPHVAGVAGLIRAANPDISVAQARQILRDTAQEAGSFTQYGYGIVDAHAAVVAASGGSGG

SEQ ID NO: 1981 - DNA, 1239 bp, synthetic construct
  misc_feature 1..1239: note = Variant of serine peptidase from Bacillus sinesaloumensis
  source 1..1239: mol_type = other DNA
atggcagatcaagctagtcaagctaatggaaaccaggacgtcattgaaggcgagctgatcgtttcagtggaaccgaagaacggtaaacctgatgtgagcattcaaagtgcacaatccgtaacagggcaggaagacgtccttaaatcgaaaggctttacgatcgttgataccttgcatgtagaggatagcagcgtcaagccactcgtctcgaagaatttcaataagaaagtggtggagaagatgggactggtgtatcttgttcaatactctccggaccagtttaaaagttccaacattgcgaagaaagaactcagaaaagaattgatggatctgggctttaaagtccgctatataagcgaaaattacaagatgatggcgatcgaaggtacagccactcttcaggcagtacaccctaaccaaaactggcattataatatgattaaagctccggaagcgtgggctattacgtctggatcctctagcgttaaagtagcagtcctggatacagggatcgaccataatcacccatccttggccaacttcgtgaatactaatcttggccggtcgtttgttggaggaaacaccatggatgttcaaggtcatggcacacatgttgctggcacgattgcatcttatgggagtgtaagcggagtgatgcagcatgcgacactgatcccggtcaaagtgctcgataattctggcagcgggtccctttacggtattacgcaaggcatattgtatgccgccgacatcgatgcggacgtcattaacatgtctctgggtggaggaggctataatcagagcatggatgaggctgttcaaacagcagttgctcagggaaccattgtagtagcagcgactggcaatgatggtgcatcgtcgatcagttatcctgctgcctacagcagcgtcattgcggtgggatctgtgacgtccaatcgtacacgatcctcgttttctaactatggatctgggcttgaagttatggcaccgggcagcaacatctacagtacgtatcctaattccagatatacatctttgagtggtacaagcatggctactccgcacgttgcgggcgtagctgggctcattcgcgcagccaacccagacatatctgtcgcgcaagcccgtcagattctgcgggataccgcgcaagaagcaggatcgttcacacagtacggctatggaatcgtcgatgctcatgccgccgttgttgctgcatccggtggtagcggcggc

SEQ ID NO: 1982 - protein, 413 aa, synthetic construct
  REGION 1..413: note = Variant of serine peptidase from Bacillus sinesaloumensis
MADQASQANGNQDVIEGELIVSVEPKNGKPDVSIQSAQSVTGQEDVLKSKGFTIVDTLHVEDSSVKPLVSKNFNKKVVEKMGLVYLVQYSPDQFKSSNIAKKELRKELMDLGFKVRYISENYKMMAIEGTATLQAVHPNQNWHYNMIKAPEAWAITSGSSSVKVAVLDTGIDHNHPSLANFVNTNLGRSFVGGNTMDVQGHGTHVAGTIASYGSVSGVMQHATLIPVKVLDNSGSGSLYGITQGILYAADIDADVINMSLGGGGYNQSMDEAVQTAVAQGTIVVAATGNDGASSISYPAAYSSVIAVGSVTSNRTRSSFSNYGSGLEVMAPGSNIYSTYPNSRYTSLSGTSMATPHVAGVAGLIRAANPDISVAQARQILRDTAQEAGSFTQYGYGIVDAHAAVVAASGGSGG

SEQ ID NO: 1983 - DNA, 1239 bp, synthetic construct
  misc_feature 1..1239: note = Variant of serine peptidase from Bacillus sinesaloumensis
  source 1..1239: mol_type = other DNA
atggcagatcaagctagtcaagctaatggaaaccaggacgtcattgaaggcgagctgatcgtttcagtggaaccgaagaacggtaaacctgatgtgagcattcaaagtgcacaatccgtaacagggcaggaagacgtccttaaatcgaaaggctttacgatcgttgataccttgcatgtagaggatagcagcgtcaagccactcgtctcgaagaatttcaataagaaagtggtggagaagatgggactggtgtatcttgttcaatactctccggaccagtttaaaagttccaacattgcgaagaaagaactcagaaaagaattgatggatctgggctttaaagtccgctatataagcgaaaattacaagatgatggcgatcgaaggtacagccactcttcaggcagtacaccctaaccaaaactggcattataatatgattaaagctccggaagcgtgggctattacgtctggatcctctagcgttaaagtagcagtcctggatacagggatcgaccataatcacccatccttggccaacttcgtgaatactaatcttggccggtcgtttgttggaggaaacaccatggatgttcaaggtcatggcacacatgttgctggcacgattgcatcttatgggagtgtaagcggagtgatgcagtgggcgacactgatcccggtcaaagtgctcgataattctggcagcgggtccctttacggtattacgcaaggcatattgtatgccgccgacatcgatgcggacgtcattaacatgtctctgggtggaggaggctataatcagagcatggatgaggctgttcaaacagcagttgctcagggaaccattgtagtagcagcgactggcaatgatggtgcatcgtcgatcagttatcctgctgcctacagcagcgtcattgcggtgggatctgtgacgtccaatcgtacacgatcctcgttttctaactatggatctgggcttgaagttatggcaccgggcagcaacatctacagtacgtatcctaattccagatatacatctttgagtggtacaagcatggctactccgcacgttgcgggcgtagctgggctcattcgcgcagccaacccagacatatctgtcgcgcaagcccgtcagattctgcgggataccgcgcaagaagcaggatcgttcacacagtacggctatggaatcgtcgatgctcatgccgccgttgttgctgcatccggtggtagcggcggc

SEQ ID NO: 1984 - protein, 413 aa, synthetic construct
  REGION 1..413: note = Variant of serine peptidase from Bacillus sinesaloumensis
MADQASQANGNQDVIEGELIVSVEPKNGKPDVSIQSAQSVTGQEDVLKSKGFTIVDTLHVEDSSVKPLVSKNFNKKVVEKMGLVYLVQYSPDQFKSSNIAKKELRKELMDLGFKVRYISENYKMMAIEGTATLQAVHPNQNWHYNMIKAPEAWAITSGSSSVKVAVLDTGIDHNHPSLANFVNTNLGRSFVGGNTMDVQGHGTHVAGTIASYGSVSGVMQWATLIPVKVLDNSGSGSLYGITQGILYAADIDADVINMSLGGGGYNQSMDEAVQTAVAQGTIVVAATGNDGASSISYPAAYSSVIAVGSVTSNRTRSSFSNYGSGLEVMAPGSNIYSTYPNSRYTSLSGTSMATPHVAGVAGLIRAANPDISVAQARQILRDTAQEAGSFTQYGYGIVDAHAAVVAASGGSGG

SEQ ID NO: 1985 - DNA, 1239 bp, synthetic construct
  misc_feature 1..1239: note = Variant of serine peptidase from Bacillus sinesaloumensis
  source 1..1239: mol_type = other DNA
atggcagatcaagctagtcaagctaatggaaaccaggacgtcattgaaggcgagctgatcgtttcagtggaaccgaagaacggtaaacctgatgtgagcattcaaagtgcacaatccgtaacagggcaggaagacgtccttaaatcgaaaggctttacgatcgttgataccttgcatgtagaggatagcagcgtcaagccactcgtctcgaagaatttcaataagaaagtggtggagaagatgggactggtgtatcttgttcaatactctccggaccagtttaaaagttccaacattgcgaagaaagaactcagaaaagaattgatggatctgggctttaaagtccgctatataagcgaaaattacaagatgatggcgatcgaaggtacagccactcttcaggcagtacaccctaaccaaaactggcattataatatgattaaagctccggaagcgtgggctattacgtctggatcctctagcgttaaagtagcagtcctggatacagggatcgaccataatcacccatccttggccaacttcgtgaatactaatcttggccggtcgtttgttggaggaaacaccatggatgttcaaggtcatggcacacatgttgctggcacgattgcatcttatgggagtgtaagcggagtgatgcagagtgcgacactgatcccggtcaaagtgctcgataattctggcagcgggtccctttacggtattacgcaaggcatattgtatgccgccgacatcgatgcggacgtcattaacatgtctctgggtggaggaggctataatcaggttatggatgaggctgttcaaacagcagttgctcagggaaccattgtagtagcagcgactggcaatgatggtgcatcgtcgatcagttatcctgctgcctacagcagcgtcattgcggtgggatctgtgacgtccaatcgtacacgatcctcgttttctaactatggatctgggcttgaagttatggcaccgggcagcaacatctacagtacgtatcctaattccagatatacatctttgagtggtacaagcatggctactccgcacgttgcgggcgtagctgggctcattcgcgcagccaacccagacatatctgtcgcgcaagcccgtcagattctgcgggataccgcgcaagaagcaggatcgttcacacagtacggctatggaatcgtcgatgctcatgccgccgttgttgctgcatccggtggtagcggcggc

SEQ ID NO: 1986 - protein, 413 aa, synthetic construct
  REGION 1..413: note = Variant of serine peptidase from Bacillus sinesaloumensis
MADQASQANGNQDVIEGELIVSVEPKNGKPDVSIQSAQSVTGQEDVLKSKGFTIVDTLHVEDSSVKPLVSKNFNKKVVEKMGLVYLVQYSPDQFKSSNIAKKELRKELMDLGFKVRYISENYKMMAIEGTATLQAVHPNQNWHYNMIKAPEAWAITSGSSSVKVAVLDTGIDHNHPSLANFVNTNLGRSFVGGNTMDVQGHGTHVAGTIASYGSVSGVMQSATLIPVKVLDNSGSGSLYGITQGILYAADIDADVINMSLGGGGYNQVMDEAVQTAVAQGTIVVAATGNDGASSISYPAAYSSVIAVGSVTSNRTRSSFSNYGSGLEVMAPGSNIYSTYPNSRYTSLSGTSMATPHVAGVAGLIRAANPDISVAQARQILRDTAQEAGSFTQYGYGIVDAHAAVVAASGGSGG

SEQ ID NO: 1987 - DNA, 1239 bp, synthetic construct
  misc_feature 1..1239: note = Variant of serine peptidase from Bacillus sinesaloumensis
  source 1..1239: mol_type = other DNA
atggcagatcaagctagtcaagctaatggaaaccaggacgtcattgaaggcgagctgatcgtttcagtggaaccgaagaacggtaaacctgatgtgagcattcaaagtgcacaatccgtaacagggcaggaagacgtccttaaatcgaaaggctttacgatcgttgataccttgcatgtagaggatagcagcgtcaagccactcgtctcgaagaatttcaataagaaagtggtggagaagatgggactggtgtatcttgttcaatactctccggaccagtttaaaagttccaacattgcgaagaaagaactcagaaaagaattgatggatctgggctttaaagtccgctatataagcgaaaattacaagatgatggcgatcgaaggtacagccactcttcaggcagtacaccctaaccaaaactggcattataatatgattaaagctccggaagcgtgggctattacgtctggatcctctagcgttaaagtagcagtcctggatacagggatcgaccataatcacccatccttggccaacttcgtgaatactaatcttggccggtcgtttgttggaggaaacaccatggatgttcaaggtcatggcacacatgttgctggcacgattgcatcttatgggagtgtaagcggagtgatgcagagtgcgacactgatcccggtcaaagtgctcgataattctggcagcgggtccctttacggtattacgcaaggcatattgtatgccgccgacatcgatgcggacgtcattaacatgtctctgggtggaggaggctataatcagtatatggatgaggctgttcaaacagcagttgctcagggaaccattgtagtagcagcgactggcaatgatggtgcatcgtcgatcagttatcctgctgcctacagcagcgtcattgcggtgggatctgtgacgtccaatcgtacacgatcctcgttttctaactatggatctgggcttgaagttatggcaccgggcagcaacatctacagtacgtatcctaattccagatatacatctttgagtggtacaagcatggctactccgcacgttgcgggcgtagctgggctcattcgcgcagccaacccagacatatctgtcgcgcaagcccgtcagattctgcgggataccgcgcaagaagcaggatcgttcacacagtacggctatggaatcgtcgatgctcatgccgccgttgttgctgcatccggtggtagcggcggc

SEQ ID NO: 1988 - protein, 413 aa, synthetic construct
  REGION 1..413: note = Variant of serine peptidase from Bacillus sinesaloumensis
MADQASQANGNQDVIEGELIVSVEPKNGKPDVSIQSAQSVTGQEDVLKSKGFTIVDTLHVEDSSVKPLVSKNFNKKVVEKMGLVYLVQYSPDQFKSSNIAKKELRKELMDLGFKVRYISENYKMMAIEGTATLQAVHPNQNWHYNMIKAPEAWAITSGSSSVKVAVLDTGIDHNHPSLANFVNTNLGRSFVGGNTMDVQGHGTHVAGTIASYGSVSGVMQSATLIPVKVLDNSGSGSLYGITQGILYAADIDADVINMSLGGGGYNQYMDEAVQTAVAQGTIVVAATGNDGASSISYPAAYSSVIAVGSVTSNRTRSSFSNYGSGLEVMAPGSNIYSTYPNSRYTSLSGTSMATPHVAGVAGLIRAANPDISVAQARQILRDTAQEAGSFTQYGYGIVDAHAAVVAASGGSGG

SEQ ID NO: 1989 - DNA, 1239 bp, synthetic construct
  misc_feature 1..1239: note = Variant of serine peptidase from Bacillus sinesaloumensis
  source 1..1239: mol_type = other DNA
atggcagatcaagctagtcaagctaatggaaaccaggacgtcattgaaggcgagctgatcgtttcagtggaaccgaagaacggtaaacctgatgtgagcattcaaagtgcacaatccgtaacagggcaggaagacgtccttaaatcgaaaggctttacgatcgttgataccttgcatgtagaggatagcagcgtcaagccactcgtctcgaagaatttcaataagaaagtggtggagaagatgggactggtgtatcttgttcaatactctccggaccagtttaaaagttccaacattgcgaagaaagaactcagaaaagaattgatggatctgggctttaaagtccgctatataagcgaaaattacaagatgatggcgatcgaaggtacagccactcttcaggcagtacaccctaaccaaaactggcattataatatgattaaagctccggaagcgtgggctattacgtctggatcctctagcgttaaagtagcagtcctggatacagggatcgaccataatcacccatccttggccaacttcgtgaatactaatcttggccggtcgtttgttggaggaaacaccatggatgttcaaggtcatggcacacatgttgctggcacgattgcatcttatgggagtgtaagcggagtgatgcagagtgcgacactgatcccggtcaaagtgctcgataattctggcagcgggtccctttacggtattacgcaaggcatattgtatgccgccgacatcgatgcggacgtcattaacatgtctctgggtggaggaggctataatcaggctatggatgaggctgttcaaacagcagttgctcagggaaccattgtagtagcagcgactggcaatgatggtgcatcgtcgatcagttatcctgctgcctacagcagcgtcattgcggtgggatctgtgacgtccaatcgtacacgatcctcgttttctaactatggatctgggcttgaagttatggcaccgggcagcaacatctacagtacgtatcctaattccagatatacatctttgagtggtacaagcatggctactccgcacgttgcgggcgtagctgggctcattcgcgcagccaacccagacatatctgtcgcgcaagcccgtcagattctgcgggataccgcgcaagaagcaggatcgttcacacagtacggctatggaatcgtcgatgctcatgccgccgttgttgctgcatccggtggtagcggcggc

SEQ ID NO: 1990 - protein, 413 aa, synthetic construct
  REGION 1..413: note = Variant of serine peptidase from Bacillus sinesaloumensis
MADQASQANGNQDVIEGELIVSVEPKNGKPDVSIQSAQSVTGQEDVLKSKGFTIVDTLHVEDSSVKPLVSKNFNKKVVEKMGLVYLVQYSPDQFKSSNIAKKELRKELMDLGFKVRYISENYKMMAIEGTATLQAVHPNQNWHYNMIKAPEAWAITSGSSSVKVAVLDTGIDHNHPSLANFVNTNLGRSFVGGNTMDVQGHGTHVAGTIASYGSVSGVMQSATLIPVKVLDNSGSGSLYGITQGILYAADIDADVINMSLGGGGYNQAMDEAVQTAVAQGTIVVAATGNDGASSISYPAAYSSVIAVGSVTSNRTRSSFSNYGSGLEVMAPGSNIYSTYPNSRYTSLSGTSMATPHVAGVAGLIRAANPDISVAQARQILRDTAQEAGSFTQYGYGIVDAHAAVVAASGGSGG

SEQ ID NO: 1991 - DNA, 1239 bp, synthetic construct
  misc_feature 1..1239: note = Variant of serine peptidase from Bacillus sinesaloumensis
  source 1..1239: mol_type = other DNA
atggcagatcaagctagtcaagctaatggaaaccaggacgtcattgaaggcgagctgatcgtttcagtggaaccgaagaacggtaaacctgatgtgagcattcaaagtgcacaatccgtaacagggcaggaagacgtccttaaatcgaaaggctttacgatcgttgataccttgcatgtagaggatagcagcgtcaagccactcgtctcgaagaatttcaataagaaagtggtggagaagatgggactggtgtatcttgttcaatactctccggaccagtttaaaagttccaacattgcgaagaaagaactcagaaaagaattgatggatctgggctttaaagtccgctatataagcgaaaattacaagatgatggcgatcgaaggtacagccactcttcaggcagtacaccctaaccaaaactggcattataatatgattaaagctccggaagcgtgggctattacgtctggatcctctagcgttaaagtagcagtcctggatacagggatcgaccataatcacccatccttggccaacttcgtgaatactaatcttggccggtcgtttgttggaggaaacaccatggatgttcaaggtcatggcacacatgttgctggcacgattgcatcttatgggagtgtaagcggagtgatgcagagtgcgacactgatcccggtcaaagtgctcgataattctggcagcgggtccctttacggtattacgcaaggcatattgtatgccgccgacatcgatgcggacgtcattaacatgtctctgggtggaggaggctataatcagcagatggatgaggctgttcaaacagcagttgctcagggaaccattgtagtagcagcgactggcaatgatggtgcatcgtcgatcagttatcctgctgcctacagcagcgtcattgcggtgggatctgtgacgtccaatcgtacacgatcctcgttttctaactatggatctgggcttgaagttatggcaccgggcagcaacatctacagtacgtatcctaattccagatatacatctttgagtggtacaagcatggctactccgcacgttgcgggcgtagctgggctcattcgcgcagccaacccagacatatctgtcgcgcaagcccgtcagattctgcgggataccgcgcaagaagcaggatcgttcacacagtacggctatggaatcgtcgatgctcatgccgccgttgttgctgcatccggtggtagcggcggc

SEQ ID NO: 1992 - protein, 413 aa, synthetic construct
  REGION 1..413: note = Variant of serine peptidase from Bacillus sinesaloumensis
MADQASQANGNQDVIEGELIVSVEPKNGKPDVSIQSAQSVTGQEDVLKSKGFTIVDTLHVEDSSVKPLVSKNFNKKVVEKMGLVYLVQYSPDQFKSSNIAKKELRKELMDLGFKVRYISENYKMMAIEGTATLQAVHPNQNWHYNMIKAPEAWAITSGSSSVKVAVLDTGIDHNHPSLANFVNTNLGRSFVGGNTMDVQGHGTHVAGTIASYGSVSGVMQSATLIPVKVLDNSGSGSLYGITQGILYAADIDADVINMSLGGGGYNQQMDEAVQTAVAQGTIVVAATGNDGASSISYPAAYSSVIAVGSVTSNRTRSSFSNYGSGLEVMAPGSNIYSTYPNSRYTSLSGTSMATPHVAGVAGLIRAANPDISVAQARQILRDTAQEAGSFTQYGYGIVDAHAAVVAASGGSGG

SEQ ID NO: 1993 - DNA, 1239 bp, synthetic construct
  misc_feature 1..1239: note = Variant of serine peptidase from Bacillus sinesaloumensis
  source 1..1239: mol_type = other DNA
atggcagatcaagctagtcaagctaatggaaaccaggacgtcattgaaggcgagctgatcgtttcagtggaaccgaagaacggtaaacctgatgtgagcattcaaagtgcacaatccgtaacagggcaggaagacgtccttaaatcgaaaggctttacgatcgttgataccttgcatgtagaggatagcagcgtcaagccactcgtctcgaagaatttcaataagaaagtggtggagaagatgggactggtgtatcttgttcaatactctccggaccagtttaaaagttccaacattgcgaagaaagaactcagaaaagaattgatggatctgggctttaaagtccgctatataagcgaaaattacaagatgatggcgatcgaaggtacagccactcttcaggcagtacaccctaaccaaaactggcattataatatgattaaagctccggaagcgtgggctattacgtctggatcctctagcgttaaagtagcagtcctggatacagggatcgaccataatcacccatccttggccaacttcgtgaatactaatcttggccggtcgtttgttggaggaaacaccatggatgttcaaggtcatggcacacatgttgctggcacgattgcatcttatgggagtgtaagcggagtgatgcagagtgcgacactgatcccggtcaaagtgctcgataattctggcagcgggtccctttacggtattacgcaaggcatattgtatgccgccgacatcgatgcggacgtcattaacatgtctctgggtggaggaggctataatcagccgatggatgaggctgttcaaacagcagttgctcagggaaccattgtagtagcagcgactggcaatgatggtgcatcgtcgatcagttatcctgctgcctacagcagcgtcattgcggtgggatctgtgacgtccaatcgtacacgatcctcgttttctaactatggatctgggcttgaagttatggcaccgggcagcaacatctacagtacgtatcctaattccagatatacatctttgagtggtacaagcatggctactccgcacgttgcgggcgtagctgggctcattcgcgcagccaacccagacatatctgtcgcgcaagcccgtcagattctgcgggataccgcgcaagaagcaggatcgttcacacagtacggctatggaatcgtcgatgctcatgccgccgttgttgctgcatccggtggtagcggcggc

SEQ ID NO: 1994 - protein, 413 aa, synthetic construct
  REGION 1..413: note = Variant of serine peptidase from Bacillus sinesaloumensis
MADQASQANGNQDVIEGELIVSVEPKNGKPDVSIQSAQSVTGQEDVLKSKGFTIVDTLHVEDSSVKPLVSKNFNKKVVEKMGLVYLVQYSPDQFKSSNIAKKELRKELMDLGFKVRYISENYKMMAIEGTATLQAVHPNQNWHYNMIKAPEAWAITSGSSSVKVAVLDTGIDHNHPSLANFVNTNLGRSFVGGNTMDVQGHGTHVAGTIASYGSVSGVMQSATLIPVKVLDNSGSGSLYGITQGILYAADIDADVINMSLGGGGYNQPMDEAVQTAVAQGTIVVAATGNDGASSISYPAAYSSVIAVGSVTSNRTRSSFSNYGSGLEVMAPGSNIYSTYPNSRYTSLSGTSMATPHVAGVAGLIRAANPDISVAQARQILRDTAQEAGSFTQYGYGIVDAHAAVVAASGGSGG

SEQ ID NO: 1995 - DNA, 1239 bp, synthetic construct
  misc_feature 1..1239: note = Variant of serine peptidase from Bacillus sinesaloumensis
  source 1..1239: mol_type = other DNA
atggcagatcaagctagtcaagctaatggaaaccaggacgtcattgaaggcgagctgatcgtttcagtggaaccgaagaacggtaaacctgatgtgagcattcaaagtgcacaatccgtaacagggcaggaagacgtccttaaatcgaaaggctttacgatcgttgataccttgcatgtagaggatagcagcgtcaagccactcgtctcgaagaatttcaataagaaagtggtggagaagatgggactggtgtatcttgttcaatactctccggaccagtttaaaagttccaacattgcgaagaaagaactcagaaaagaattgatggatctgggctttaaagtccgctatataagcgaaaattacaagatgatggcgatcgaaggtacagccactcttcaggcagtacaccctaaccaaaactggcattataatatgattaaagctccggaagcgtgggctattacgtctggatcctctagcgttaaagtagcagtcctggatacagggatcgaccataatcacccatccttggccaacttcgtgaatactaatcttggccggtcgtttgttggaggaaacaccatggatgttcaaggtcatggcacacatgttgctggcacgattgcatcttatgggagtgtaagcggagtgatgcagagtgcgacactgatcccggtcaaagtgctcgataattctggcagcgggtccctttacggtattacgcaaggcatattgtatgccgccgacatcgatgcggacgtcattaacatgtctctgggtggaggaggctataatcagggtatggatgaggctgttcaaacagcagttgctcagggaaccattgtagtagcagcgactggcaatgatggtgcatcgtcgatcagttatcctgctgcctacagcagcgtcattgcggtgggatctgtgacgtccaatcgtacacgatcctcgttttctaactatggatctgggcttgaagttatggcaccgggcagcaacatctacagtacgtatcctaattccagatatacatctttgagtggtacaagcatggctactccgcacgttgcgggcgtagctgggctcattcgcgcagccaacccagacatatctgtcgcgcaagcccgtcagattctgcgggataccgcgcaagaagcaggatcgttcacacagtacggctatggaatcgtcgatgctcatgccgccgttgttgctgcatccggtggtagcggcggc

SEQ ID NO: 1996 - protein, 413 aa, synthetic construct
  REGION 1..413: note = Variant of serine peptidase from Bacillus sinesaloumensis
MADQASQANGNQDVIEGELIVSVEPKNGKPDVSIQSAQSVTGQEDVLKSKGFTIVDTLHVEDSSVKPLVSKNFNKKVVEKMGLVYLVQYSPDQFKSSNIAKKELRKELMDLGFKVRYISENYKMMAIEGTATLQAVHPNQNWHYNMIKAPEAWAITSGSSSVKVAVLDTGIDHNHPSLANFVNTNLGRSFVGGNTMDVQGHGTHVAGTIASYGSVSGVMQSATLIPVKVLDNSGSGSLYGITQGILYAADIDADVINMSLGGGGYNQGMDEAVQTAVAQGTIVVAATGNDGASSISYPAAYSSVIAVGSVTSNRTRSSFSNYGSGLEVMAPGSNIYSTYPNSRYTSLSGTSMATPHVAGVAGLIRAANPDISVAQARQILRDTAQEAGSFTQYGYGIVDAHAAVVAASGGSGG

SEQ ID NO: 1997 - DNA, 1239 bp, synthetic construct
  misc_feature 1..1239: note = Variant of serine peptidase from Bacillus sinesaloumensis
  source 1..1239: mol_type = other DNA
atggcagatcaagctagtcaagctaatggaaaccaggacgtcattgaaggcgagctgatcgtttcagtggaaccgaagaacggtaaacctgatgtgagcattcaaagtgcacaatccgtaacagggcaggaagacgtccttaaatcgaaaggctttacgatcgttgataccttgcatgtagaggatagcagcgtcaagccactcgtctcgaagaatttcaataagaaagtggtggagaagatgggactggtgtatcttgttcaatactctccggaccagtttaaaagttccaacattgcgaagaaagaactcagaaaagaattgatggatctgggctttaaagtccgctatataagcgaaaattacaagatgatggcgatcgaaggtacagccactcttcaggcagtacaccctaaccaaaactggcattataatatgattaaagctccggaagcgtgggctattacgtctggatcctctagcgttaaagtagcagtcctggatacagggatcgaccataatcacccatccttggccaacttcgtgaatactaatcttggccggtcgtttgttggaggaaacaccatggatgttcaaggtcatggcacacatgttgctggcacgattgcatcttatgggagtgtaagcggagtgatgcagagtgcgacactgatcccggtcaaagtgctcgataattctggcagcgggtccctttacggtattacgcaaggcatattgtatgccgccgacatcgatgcggacgtcattaacatgtctctgggtggaggaggctataatcagacgatggatgaggctgttcaaacagcagttgctcagggaaccattgtagtagcagcgactggcaatgatggtgcatcgtcgatcagttatcctgctgcctacagcagcgtcattgcggtgggatctgtgacgtccaatcgtacacgatcctcgttttctaactatggatctgggcttgaagttatggcaccgggcagcaacatctacagtacgtatcctaattccagatatacatctttgagtggtacaagcatggctactccgcacgttgcgggcgtagctgggctcattcgcgcagccaacccagacatatctgtcgcgcaagcccgtcagattctgcgggataccgcgcaagaagcaggatcgttcacacagtacggctatggaatcgtcgatgctcatgccgccgttgttgctgcatccggtggtagcggcggc

SEQ ID NO: 1998 - protein, 413 aa, synthetic construct
  REGION 1..413: note = Variant of serine peptidase from Bacillus sinesaloumensis
MADQASQANGNQDVIEGELIVSVEPKNGKPDVSIQSAQSVTGQEDVLKSKGFTIVDTLHVEDSSVKPLVSKNFNKKVVEKMGLVYLVQYSPDQFKSSNIAKKELRKELMDLGFKVRYISENYKMMAIEGTATLQAVHPNQNWHYNMIKAPEAWAITSGSSSVKVAVLDTGIDHNHPSLANFVNTNLGRSFVGGNTMDVQGHGTHVAGTIASYGSVSGVMQSATLIPVKVLDNSGSGSLYGITQGILYAADIDADVINMSLGGGGYNQTMDEAVQTAVAQGTIVVAATGNDGASSISYPAAYSSVIAVGSVTSNRTRSSFSNYGSGLEVMAPGSNIYSTYPNSRYTSLSGTSMATPHVAGVAGLIRAANPDISVAQARQILRDTAQEAGSFTQYGYGIVDAHAAVVAASGGSGG

SEQ ID NO: 1999 - DNA, 1239 bp, synthetic construct
  misc_feature 1..1239: note = Variant of serine peptidase from Bacillus sinesaloumensis
  source 1..1239: mol_type = other DNA
atggcagatcaagctagtcaagctaatggaaaccaggacgtcattgaaggcgagctgatcgtttcagtggaaccgaagaacggtaaacctgatgtgagcattcaaagtgcacaatccgtaacagggcaggaagacgtccttaaatcgaaaggctttacgatcgttgataccttgcatgtagaggatagcagcgtcaagccactcgtctcgaagaatttcaataagaaagtggtggagaagatgggactggtgtatcttgttcaatactctccggaccagtttaaaagttccaacattgcgaagaaagaactcagaaaagaattgatggatctgggctttaaagtccgctatataagcgaaaattacaagatgatggcgatcgaaggtacagccactcttcaggcagtacaccctaaccaaaactggcattataatatgattaaagctccggaagcgtgggctattacgtctggatcctctagcgttaaagtagcagtcctggatacagggatcgaccataatcacccatccttggccaacttcgtgaatactaatcttggccggtcgtttgttggaggaaacaccatggatgttcaaggtcatggcacacatgttgctggcacgattgcatcttatgggagtgtaagcggagtgatgcagagtgcgacactgatcccggtcaaagtgctcgataattctggcagcgggtccctttacggtattacgcaaggcatattgtatgccgccgacatcgatgcggacgtcattaacatgtctctgggtggaggaggctataatcagcatatggatgaggctgttcaaacagcagttgctcagggaaccattgtagtagcagcgactggcaatgatggtgcatcgtcgatcagttatcctgctgcctacagcagcgtcattgcggtgggatctgtgacgtccaatcgtacacgatcctcgttttctaactatggatctgggcttgaagttatggcaccgggcagcaacatctacagtacgtatcctaattccagatatacatctttgagtggtacaagcatggctactccgcacgttgcgggcgtagctgggctcattcgcgcagccaacccagacatatctgtcgcgcaagcccgtcagattctgcgggataccgcgcaagaagcaggatcgttcacacagtacggctatggaatcgtcgatgctcatgccgccgttgttgctgcatccggtggtagcggcggc

SEQ ID NO: 2000 - protein, 413 aa, synthetic construct
  REGION 1..413: note = Variant of serine peptidase from Bacillus sinesaloumensis
MADQASQANGNQDVIEGELIVSVEPKNGKPDVSIQSAQSVTGQEDVLKSKGFTIVDTLHVEDSSVKPLVSKNFNKKVVEKMGLVYLVQYSPDQFKSSNIAKKELRKELMDLGFKVRYISENYKMMAIEGTATLQAVHPNQNWHYNMIKAPEAWAITSGSSSVKVAVLDTGIDHNHPSLANFVNTNLGRSFVGGNTMDVQGHGTHVAGTIASYGSVSGVMQSATLIPVKVLDNSGSGSLYGITQGILYAADIDADVINMSLGGGGYNQHMDEAVQTAVAQGTIVVAATGNDGASSISYPAAYSSVIAVGSVTSNRTRSSFSNYGSGLEVMAPGSNIYSTYPNSRYTSLSGTSMATPHVAGVAGLIRAANPDISVAQARQILRDTAQEAGSFTQYGYGIVDAHAAVVAASGGSGG

SEQ ID NO: 2001 - DNA, 1239 bp, synthetic construct
  misc_feature 1..1239: note = Variant of serine peptidase from Bacillus sinesaloumensis
  source 1..1239: mol_type = other DNA
atggcagatcaagctagtcaagctaatggaaaccaggacgtcattgaaggcgagctgatcgtttcagtggaaccgaagaacggtaaacctgatgtgagcattcaaagtgcacaatccgtaacagggcaggaagacgtccttaaatcgaaaggctttacgatcgttgataccttgcatgtagaggatagcagcgtcaagccactcgtctcgaagaatttcaataagaaagtggtggagaagatgggactggtgtatcttgttcaatactctccggaccagtttaaaagttccaacattgcgaagaaagaactcagaaaagaattgatggatctgggctttaaagtccgctatataagcgaaaattacaagatgatggcgatcgaaggtacagccactcttcaggcagtacaccctaaccaaaactggcattataatatgattaaagctccggaagcgtgggctattacgtctggatcctctagcgttaaagtagcagtcctggatacagggatcgaccataatcacccatccttggccaacttcgtgaatactaatcttggccggtcgtttgttggaggaaacaccatggatgttcaaggtcatggcacacatgttgctggcacgattgcatcttatgggagtgtaagcggagtgatgcagagtgcgacactgatcccggtcaaagtgctcgataattctggcagcgggtccctttacggtattacgcaaggcatattgtatgccgccgacatcgatgcggacgtcattaacatgtctctgggtggaggaggctataatcagattatggatgaggctgttcaaacagcagttgctcagggaaccattgtagtagcagcgactggcaatgatggtgcatcgtcgatcagttatcctgctgcctacagcagcgtcattgcggtgggatctgtgacgtccaatcgtacacgatcctcgttttctaactatggatctgggcttgaagttatggcaccgggcagcaacatctacagtacgtatcctaattccagatatacatctttgagtggtacaagcatggctactccgcacgttgcgggcgtagctgggctcattcgcgcagccaacccagacatatctgtcgcgcaagcccgtcagattctgcgggataccgcgcaagaagcaggatcgttcacacagtacggctatggaatcgtcgatgctcatgccgccgttgttgctgcatccggtggtagcggcggc

SEQ ID NO: 2002 - protein, 413 aa, synthetic construct
  REGION 1..413: note = Variant of serine peptidase from Bacillus sinesaloumensis
MADQASQANGNQDVIEGELIVSVEPKNGKPDVSIQSAQSVTGQEDVLKSKGFTIVDTLHVEDSSVKPLVSKNFNKKVVEKMGLVYLVQYSPDQFKSSNIAKKELRKELMDLGFKVRYISENYKMMAIEGTATLQAVHPNQNWHYNMIKAPEAWAITSGSSSVKVAVLDTGIDHNHPSLANFVNTNLGRSFVGGNTMDVQGHGTHVAGTIASYGSVSGVMQSATLIPVKVLDNSGSGSLYGITQGILYAADIDADVINMSLGGGGYNQIMDEAVQTAVAQGTIVVAATGNDGASSISYPAAYSSVIAVGSVTSNRTRSSFSNYGSGLEVMAPGSNIYSTYPNSRYTSLSGTSMATPHVAGVAGLIRAANPDISVAQARQILRDTAQEAGSFTQYGYGIVDAHAAVVAASGGSGG

SEQ ID NO: 2003 - DNA, 1239 bp, synthetic construct
  misc_feature 1..1239: note = Variant of serine peptidase from Bacillus sinesaloumensis
  source 1..1239: mol_type = other DNA
atggcagatcaagctagtcaagctaatggaaaccaggacgtcattgaaggcgagctgatcgtttcagtggaaccgaagaacggtaaacctgatgtgagcattcaaagtgcacaatccgtaacagggcaggaagacgtccttaaatcgaaaggctttacgatcgttgataccttgcatgtagaggatagcagcgtcaagccactcgtctcgaagaatttcaataagaaagtggtggagaagatgggactggtgtatcttgttcaatactctccggaccagtttaaaagttccaacattgcgaagaaagaactcagaaaagaattgatggatctgggctttaaagtccgctatataagcgaaaattacaagatgatggcgatcgaaggtacagccactcttcaggcagtacaccctaaccaaaactggcattataatatgattaaagctccggaagcgtgggctattacgtctggatcctctagcgttaaagtagcagtcctggatacagggatcgaccataatcacccatccttggccaacttcgtgaatactaatcttggccggtcgtttgttggaggaaacaccatggatgttcaaggtcatggcacacatgttgctggcacgattgcatcttatgggagtgtaagcggagtgatgcagagtgcgacactgatcccggtcaaagtgctcgataattctggcagcgggtccctttacggtattacgcaaggcatattgtatgccgccgacatcgatgcggacgtcattaacatgtctctgggtggaggaggctataatcagtttatggatgaggctgttcaaacagcagttgctcagggaaccattgtagtagcagcgactggcaatgatggtgcatcgtcgatcagttatcctgctgcctacagcagcgtcattgcggtgggatctgtgacgtccaatcgtacacgatcctcgttttctaactatggatctgggcttgaagttatggcaccgggcagcaacatctacagtacgtatcctaattccagatatacatctttgagtggtacaagcatggctactccgcacgttgcgggcgtagctgggctcattcgcgcagccaacccagacatatctgtcgcgcaagcccgtcagattctgcgggataccgcgcaagaagcaggatcgttcacacagtacggctatggaatcgtcgatgctcatgccgccgttgttgctgcatccggtggtagcggcggc

SEQ ID NO: 2004 - protein, 413 aa, synthetic construct
  REGION 1..413: note = Variant of serine peptidase from Bacillus sinesaloumensis
MADQASQANGNQDVIEGELIVSVEPKNGKPDVSIQSAQSVTGQEDVLKSKGFTIVDTLHVEDSSVKPLVSKNFNKKVVEKMGLVYLVQYSPDQFKSSNIAKKELRKELMDLGFKVRYISENYKMMAIEGTATLQAVHPNQNWHYNMIKAPEAWAITSGSSSVKVAVLDTGIDHNHPSLANFVNTNLGRSFVGGNTMDVQGHGTHVAGTIASYGSVSGVMQSATLIPVKVLDNSGSGSLYGITQGILYAADIDADVINMSLGGGGYNQFMDEAVQTAVAQGTIVVAATGNDGASSISYPAAYSSVIAVGSVTSNRTRSSFSNYGSGLEVMAPGSNIYSTYPNSRYTSLSGTSMATPHVAGVAGLIRAANPDISVAQARQILRDTAQEAGSFTQYGYGIVDAHAAVVAASGGSGG

SEQ ID NO: 2005 - DNA, 1239 bp, synthetic construct
  misc_feature 1..1239: note = Variant of serine peptidase from Bacillus sinesaloumensis
  source 1..1239: mol_type = other DNA
atggcagatcaagctagtcaagctaatggaaaccaggacgtcattgaaggcgagctgatcgtttcagtggaaccgaagaacggtaaacctgatgtgagcattcaaagtgcacaatccgtaacagggcaggaagacgtccttaaatcgaaaggctttacgatcgttgataccttgcatgtagaggatagcagcgtcaagccactcgtctcgaagaatttcaataagaaagtggtggagaagatgggactggtgtatcttgttcaatactctccggaccagtttaaaagttccaacattgcgaagaaagaactcagaaaagaattgatggatctgggctttaaagtccgctatataagcgaaaattacaagatgatggcgatcgaaggtacagccactcttcaggcagtacaccctaaccaaaactggcattataatatgattaaagctccggaagcgtgggctattacgtctggatcctctagcgttaaagtagcagtcctggatacagggatcgaccataatcacccatccttggccaacttcgtgaatactaatcttggccggtcgtttgttggaggaaacaccatggatgttcaaggtcatggcacacatgttgctggcacgattgcatcttatgggagtgtaagcggagtgatgcagagtgcgacactgatcccggtcaaagtgctcgataattctggcagcgggtccctttacggtattacgcaaggcatattgtatgccgccgacatcgatgcggacgtcattaacatgtctctgggtggaggaggctataatcagaacatggatgaggctgttcaaacagcagttgctcagggaaccattgtagtagcagcgactggcaatgatggtgcatcgtcgatcagttatcctgctgcctacagcagcgtcattgcggtgggatctgtgacgtccaatcgtacacgatcctcgttttctaactatggatctgggcttgaagttatggcaccgggcagcaacatctacagtacgtatcctaattccagatatacatctttgagtggtacaagcatggctactccgcacgttgcgggcgtagctgggctcattcgcgcagccaacccagacatatctgtcgcgcaagcccgtcagattctgcgggataccgcgcaagaagcaggatcgttcacacagtacggctatggaatcgtcgatgctcatgccgccgttgttgctgcatccggtggtagcggcggc

SEQ ID NO: 2006 - protein, 413 aa, synthetic construct
  REGION 1..413: note = Variant of serine peptidase from Bacillus sinesaloumensis
MADQASQANGNQDVIEGELIVSVEPKNGKPDVSIQSAQSVTGQEDVLKSKGFTIVDTLHVEDSSVKPLVSKNFNKKVVEKMGLVYLVQYSPDQFKSSNIAKKELRKELMDLGFKVRYISENYKMMAIEGTATLQAVHPNQNWHYNMIKAPEAWAITSGSSSVKVAVLDTGIDHNHPSLANFVNTNLGRSFVGGNTMDVQGHGTHVAGTIASYGSVSGVMQSATLIPVKVLDNSGSGSLYGITQGILYAADIDADVINMSLGGGGYNQNMDEAVQTAVAQGTIVVAATGNDGASSISYPAAYSSVIAVGSVTSNRTRSSFSNYGSGLEVMAPGSNIYSTYPNSRYTSLSGTSMATPHVAGVAGLIRAANPDISVAQARQILRDTAQEAGSFTQYGYGIVDAHAAVVAASGGSGG

SEQ ID NO: 2007 - DNA, 1239 bp, synthetic construct
  misc_feature 1..1239: note = Variant of serine peptidase from Bacillus sinesaloumensis
  source 1..1239: mol_type = other DNA
atggcagatcaagctagtcaagctaatggaaaccaggacgtcattgaaggcgagctgatcgtttcagtggaaccgaagaacggtaaacctgatgtgagcattcaaagtgcacaatccgtaacagggcaggaagacgtccttaaatcgaaaggctttacgatcgttgataccttgcatgtagaggatagcagcgtcaagccactcgtctcgaagaatttcaataagaaagtggtggagaagatgggactggtgtatcttgttcaatactctccggaccagtttaaaagttccaacattgcgaagaaagaactcagaaaagaattgatggatctgggctttaaagtccgctatataagcgaaaattacaagatgatggcgatcgaaggtacagccactcttcaggcagtacaccctaaccaaaactggcattataatatgattaaagctccggaagcgtgggctattacgtctggatcctctagcgttaaagtagcagtcctggatacagggatcgaccataatcacccatccttggccaacttcgtgaatactaatcttggccggtcgtttgttggaggaaacaccatggatgttcaaggtcatggcacacatgttgctggcacgattgcatcttatgggagtgtaagcggagtgatgcagagtgcgacactgatcccggtcaaagtgctcgataattctggcagcgggtccctttacggtattacgcaaggcatattgtatgccgccgacatcgatgcggacgtcattaacatgtctctgggtggaggaggctataatcagagcatggatgaggcttcgcaaacagcagttgctcagggaaccattgtagtagcagcgactggcaatgatggtgcatcgtcgatcagttatcctgctgcctacagcagcgtcattgcggtgggatctgtgacgtccaatcgtacacgatcctcgttttctaactatggatctgggcttgaagttatggcaccgggcagcaacatctacagtacgtatcctaattccagatatacatctttgagtggtacaagcatggctactccgcacgttgcgggcgtagctgggctcattcgcgcagccaacccagacatatctgtcgcgcaagcccgtcagattctgcgggataccgcgcaagaagcaggatcgttcacacagtacggctatggaatcgtcgatgctcatgccgccgttgttgctgcatccggtggtagcggcggc

SEQ ID NO: 2008 - protein, 413 aa, synthetic construct
  REGION 1..413: note = Variant of serine peptidase from Bacillus sinesaloumensis
MADQASQANGNQDVIEGELIVSVEPKNGKPDVSIQSAQSVTGQEDVLKSKGFTIVDTLHVEDSSVKPLVSKNFNKKVVEKMGLVYLVQYSPDQFKSSNIAKKELRKELMDLGFKVRYISENYKMMAIEGTATLQAVHPNQNWHYNMIKAPEAWAITSGSSSVKVAVLDTGIDHNHPSLANFVNTNLGRSFVGGNTMDVQGHGTHVAGTIASYGSVSGVMQSATLIPVKVLDNSGSGSLYGITQGILYAADIDADVINMSLGGGGYNQSMDEASQTAVAQGTIVVAATGNDGASSISYPAAYSSVIAVGSVTSNRTRSSFSNYGSGLEVMAPGSNIYSTYPNSRYTSLSGTSMATPHVAGVAGLIRAANPDISVAQARQILRDTAQEAGSFTQYGYGIVDAHAAVVAASGGSGG

SEQ ID NO: 2009 - DNA, 1239 bp, synthetic construct
  misc_feature 1..1239: note = Variant of serine peptidase from Bacillus sinesaloumensis
  source 1..1239: mol_type = other DNA
atggcagatcaagctagtcaagctaatggaaaccaggacgtcattgaaggcgagctgatcgtttcagtggaaccgaagaacggtaaacctgatgtgagcattcaaagtgcacaatccgtaacagggcaggaagacgtccttaaatcgaaaggctttacgatcgttgataccttgcatgtagaggatagcagcgtcaagccactcgtctcgaagaatttcaataagaaagtggtggagaagatgggactggtgtatcttgttcaatactctccggaccagtttaaaagttccaacattgcgaagaaagaactcagaaaagaattgatggatctgggctttaaagtccgctatataagcgaaaattacaagatgatggcgatcgaaggtacagccactcttcaggcagtacaccctaaccaaaactggcattataatatgattaaagctccggaagcgtgggctattacgtctggatcctctagcgttaaagtagcagtcctggatacagggatcgaccataatcacccatccttggccaacttcgtgaatactaatcttggccggtcgtttgttggaggaaacaccatggatgttcaaggtcatggcacacatgttgctggcacgattgcatcttatgggagtgtaagcggagtgatgcagagtgcgacactgatcccggtcaaagtgctcgataattctggcagcgggtccctttacggtattacgcaaggcatattgtatgccgccgacatcgatgcggacgtcattaacatgtctctgggtggaggaggctataatcagagcatggatgaggcttgtcaaacagcagttgctcagggaaccattgtagtagcagcgactggcaatgatggtgcatcgtcgatcagttatcctgctgcctacagcagcgtcattgcggtgggatctgtgacgtccaatcgtacacgatcctcgttttctaactatggatctgggcttgaagttatggcaccgggcagcaacatctacagtacgtatcctaattccagatatacatctttgagtggtacaagcatggctactccgcacgttgcgggcgtagctgggctcattcgcgcagccaacccagacatatctgtcgcgcaagcccgtcagattctgcgggataccgcgcaagaagcaggatcgttcacacagtacggctatggaatcgtcgatgctcatgccgccgttgttgctgcatccggtggtagcggcggc

SEQ ID NO: 2010 - protein, 413 aa, synthetic construct
  REGION 1..413: note = Variant of serine peptidase from Bacillus sinesaloumensis
MADQASQANGNQDVIEGELIVSVEPKNGKPDVSIQSAQSVTGQEDVLKSKGFTIVDTLHVEDSSVKPLVSKNFNKKVVEKMGLVYLVQYSPDQFKSSNIAKKELRKELMDLGFKVRYISENYKMMAIEGTATLQAVHPNQNWHYNMIKAPEAWAITSGSSSVKVAVLDTGIDHNHPSLANFVNTNLGRSFVGGNTMDVQGHGTHVAGTIASYGSVSGVMQSATLIPVKVLDNSGSGSLYGITQGILYAADIDADVINMSLGGGGYNQSMDEACQTAVAQGTIVVAATGNDGASSISYPAAYSSVIAVGSVTSNRTRSSFSNYGSGLEVMAPGSNIYSTYPNSRYTSLSGTSMATPHVAGVAGLIRAANPDISVAQARQILRDTAQEAGSFTQYGYGIVDAHAAVVAASGGSGG

SEQ ID NO: 2011 - DNA, 1239 bp, synthetic construct
  misc_feature 1..1239: note = Variant of serine peptidase from Bacillus sinesaloumensis
  source 1..1239: mol_type = other DNA
atggcagatcaagctagtcaagctaatggaaaccaggacgtcattgaaggcgagctgatcgtttcagtggaaccgaagaacggtaaacctgatgtgagcattcaaagtgcacaatccgtaacagggcaggaagacgtccttaaatcgaaaggctttacgatcgttgataccttgcatgtagaggatagcagcgtcaagccactcgtctcgaagaatttcaataagaaagtggtggagaagatgggactggtgtatcttgttcaatactctccggaccagtttaaaagttccaacattgcgaagaaagaactcagaaaagaattgatggatctgggctttaaagtccgctatataagcgaaaattacaagatgatggcgatcgaaggtacagccactcttcaggcagtacaccctaaccaaaactggcattataatatgattaaagctccggaagcgtgggctattacgtctggatcctctagcgttaaagtagcagtcctggatacagggatcgaccataatcacccatccttggccaacttcgtgaatactaatcttggccggtcgtttgttggaggaaacaccatggatgttcaaggtcatggcacacatgttgctggcacgattgcatcttatgggagtgtaagcggagtgatgcagagtgcgacactgatcccggtcaaagtgctcgataattctggcagcgggtccctttacggtattacgcaaggcatattgtatgccgccgacatcgatgcggacgtcattaacatgtctctgggtggaggaggctataatcagagcatggatgaggctgcgcaaacagcagttgctcagggaaccattgtagtagcagcgactggcaatgatggtgcatcgtcgatcagttatcctgctgcctacagcagcgtcattgcggtgggatctgtgacgtccaatcgtacacgatcctcgttttctaactatggatctgggcttgaagttatggcaccgggcagcaacatctacagtacgtatcctaattccagatatacatctttgagtggtacaagcatggctactccgcacgttgcgggcgtagctgggctcattcgcgcagccaacccagacatatctgtcgcgcaagcccgtcagattctgcgggataccgcgcaagaagcaggatcgttcacacagtacggctatggaatcgtcgatgctcatgccgccgttgttgctgcatccggtggtagcggcggc

SEQ ID NO: 2012 - protein, 413 aa, synthetic construct
  REGION 1..413: note = Variant of serine peptidase from Bacillus sinesaloumensis
MADQASQANGNQDVIEGELIVSVEPKNGKPDVSIQSAQSVTGQEDVLKSKGFTIVDTLHVEDSSVKPLVSKNFNKKVVEKMGLVYLVQYSPDQFKSSNIAKKELRKELMDLGFKVRYISENYKMMAIEGTATLQAVHPNQNWHYNMIKAPEAWAITSGSSSVKVAVLDTGIDHNHPSLANFVNTNLGRSFVGGNTMDVQGHGTHVAGTIASYGSVSGVMQSATLIPVKVLDNSGSGSLYGITQGILYAADIDADVINMSLGGGGYNQSMDEAAQTAVAQGTIVVAATGNDGASSISYPAAYSSVIAVGSVTSNRTRSSFSNYGSGLEVMAPGSNIYSTYPNSRYTSLSGTSMATPHVAGVAGLIRAANPDISVAQARQILRDTAQEAGSFTQYGYGIVDAHAAVVAASGGSGG

SEQ ID NO: 2013 - DNA, 1239 bp, synthetic construct
  misc_feature 1..1239: note = Variant of serine peptidase from Bacillus sinesaloumensis
  source 1..1239: mol_type = other DNA
atggcagatcaagctagtcaagctaatggaaaccaggacgtcattgaaggcgagctgatcgtttcagtggaaccgaagaacggtaaacctgatgtgagcattcaaagtgcacaatccgtaacagggcaggaagacgtccttaaatcgaaaggctttacgatcgttgataccttgcatgtagaggatagcagcgtcaagccactcgtctcgaagaatttcaataagaaagtggtggagaagatgggactggtgtatcttgttcaatactctccggaccagtttaaaagttccaacattgcgaagaaagaactcagaaaagaattgatggatctgggctttaaagtccgctatataagcgaaaattacaagatgatggcgatcgaaggtacagccactcttcaggcagtacaccctaaccaaaactggcattataatatgattaaagctccggaagcgtgggctattacgtctggatcctctagcgttaaagtagcagtcctggatacagggatcgaccataatcacccatccttggccaacttcgtgaatactaatcttggccggtcgtttgttggaggaaacaccatggatgttcaaggtcatggcacacatgttgctggcacgattgcatcttatgggagtgtaagcggagtgatgcagagtgcgacactgatcccggtcaaagtgctcgataattctggcagcgggtccctttacggtattacgcaaggcatattgtatgccgccgacatcgatgcggacgtcattaacatgtctctgggtggaggaggctataatcagagcatggatgaggctctgcaaacagcagttgctcagggaaccattgtagtagcagcgactggcaatgatggtgcatcgtcgatcagttatcctgctgcctacagcagcgtcattgcggtgggatctgtgacgtccaatcgtacacgatcctcgttttctaactatggatctgggcttgaagttatggcaccgggcagcaacatctacagtacgtatcctaattccagatatacatctttgagtggtacaagcatggctactccgcacgttgcgggcgtagctgggctcattcgcgcagccaacccagacatatctgtcgcgcaagcccgtcagattctgcgggataccgcgcaagaagcaggatcgttcacacagtacggctatggaatcgtcgatgctcatgccgccgttgttgctgcatccggtggtagcggcggc

SEQ ID NO: 2014 - protein, 413 aa, synthetic construct
  REGION 1..413: note = Variant of serine peptidase from Bacillus sinesaloumensis
MADQASQANGNQDVIEGELIVSVEPKNGKPDVSIQSAQSVTGQEDVLKSKGFTIVDTLHVEDSSVKPLVSKNFNKKVVEKMGLVYLVQYSPDQFKSSNIAKKELRKELMDLGFKVRYISENYKMMAIEGTATLQAVHPNQNWHYNMIKAPEAWAITSGSSSVKVAVLDTGIDHNHPSLANFVNTNLGRSFVGGNTMDVQGHGTHVAGTIASYGSVSGVMQSATLIPVKVLDNSGSGSLYGITQGILYAADIDADVINMSLGGGGYNQSMDEALQTAVAQGTIVVAATGNDGASSISYPAAYSSVIAVGSVTSNRTRSSFSNYGSGLEVMAPGSNIYSTYPNSRYTSLSGTSMATPHVAGVAGLIRAANPDISVAQARQILRDTAQEAGSFTQYGYGIVDAHAAVVAASGGSGG

SEQ ID NO: 2015 - DNA, 1239 bp, synthetic construct
  misc_feature 1..1239: note = Variant of serine peptidase from Bacillus sinesaloumensis
  source 1..1239: mol_type = other DNA
atggcagatcaagctagtcaagctaatggaaaccaggacgtcattgaaggcgagctgatcgtttcagtggaaccgaagaacggtaaacctgatgtgagcattcaaagtgcacaatccgtaacagggcaggaagacgtccttaaatcgaaaggctttacgatcgttgataccttgcatgtagaggatagcagcgtcaagccactcgtctcgaagaatttcaataagaaagtggtggagaagatgggactggtgtatcttgttcaatactctccggaccagtttaaaagttccaacattgcgaagaaagaactcagaaaagaattgatggatctgggctttaaagtccgctatataagcgaaaattacaagatgatggcgatcgaaggtacagccactcttcaggcagtacaccctaaccaaaactggcattataatatgattaaagctccggaagcgtgggctattacgtctggatcctctagcgttaaagtagcagtcctggatacagggatcgaccataatcacccatccttggccaacttcgtgaatactaatcttggccggtcgtttgttggaggaaacaccatggatgttcaaggtcatggcacacatgttgctggcacgattgcatcttatgggagtgtaagcggagtgatgcagagtgcgacactgatcccggtcaaagtgctcgataattctggcagcgggtccctttacggtattacgcaaggcatattgtatgccgccgacatcgatgcggacgtcattaacatgtctctgggtggaggaggctataatcagagcatggatgaggcttttcaaacagcagttgctcagggaaccattgtagtagcagcgactggcaatgatggtgcatcgtcgatcagttatcctgctgcctacagcagcgtcattgcggtgggatctgtgacgtccaatcgtacacgatcctcgttttctaactatggatctgggcttgaagttatggcaccgggcagcaacatctacagtacgtatcctaattccagatatacatctttgagtggtacaagcatggctactccgcacgttgcgggcgtagctgggctcattcgcgcagccaacccagacatatctgtcgcgcaagcccgtcagattctgcgggataccgcgcaagaagcaggatcgttcacacagtacggctatggaatcgtcgatgctcatgccgccgttgttgctgcatccggtggtagcggcggc

SEQ ID NO: 2016 - protein, 413 aa, synthetic construct
  REGION 1..413: note = Variant of serine peptidase from Bacillus sinesaloumensis
MADQASQANGNQDVIEGELIVSVEPKNGKPDVSIQSAQSVTGQEDVLKSKGFTIVDTLHVEDSSVKPLVSKNFNKKVVEKMGLVYLVQYSPDQFKSSNIAKKELRKELMDLGFKVRYISENYKMMAIEGTATLQAVHPNQNWHYNMIKAPEAWAITSGSSSVKVAVLDTGIDHNHPSLANFVNTNLGRSFVGGNTMDVQGHGTHVAGTIASYGSVSGVMQSATLIPVKVLDNSGSGSLYGITQGILYAADIDADVINMSLGGGGYNQSMDEAFQTAVAQGTIVVAATGNDGASSISYPAAYSSVIAVGSVTSNRTRSSFSNYGSGLEVMAPGSNIYSTYPNSRYTSLSGTSMATPHVAGVAGLIRAANPDISVAQARQILRDTAQEAGSFTQYGYGIVDAHAAVVAASGGSGG

SEQ ID NO: 2017 - DNA, 1239 bp, synthetic construct
  misc_feature 1..1239: note = Variant of serine peptidase from Bacillus sinesaloumensis
  source 1..1239: mol_type = other DNA
atggcagatcaagctagtcaagctaatggaaaccaggacgtcattgaaggcgagctgatcgtttcagtggaaccgaagaacggtaaacctgatgtgagcattcaaagtgcacaatccgtaacagggcaggaagacgtccttaaatcgaaaggctttacgatcgttgataccttgcatgtagaggatagcagcgtcaagccactcgtctcgaagaatttcaataagaaagtggtggagaagatgggactggtgtatcttgttcaatactctccggaccagtttaaaagttccaacattgcgaagaaagaactcagaaaagaattgatggatctgggctttaaagtccgctatataagcgaaaattacaagatgatggcgatcgaaggtacagccactcttcaggcagtacaccctaaccaaaactggcattataatatgattaaagctccggaagcgtgggctattacgtctggatcctctagcgttaaagtagcagtcctggatacagggatcgaccataatcacccatccttggccaacttcgtgaatactaatcttggccggtcgtttgttggaggaaacaccatggatgttcaaggtcatggcacacatgttgctggcacgattgcatcttatgggagtgtaagcggagtgatgcagagtgcgacactgatcccggtcaaagtgctcgataattctggcagcgggtccctttacggtattacgcaaggcatattgtatgccgccgacatcgatgcggacgtcattaacatgtctctgggtggaggaggctataatcagagcatggatgaggctacgcaaacagcagttgctcagggaaccattgtagtagcagcgactggcaatgatggtgcatcgtcgatcagttatcctgctgcctacagcagcgtcattgcggtgggatctgtgacgtccaatcgtacacgatcctcgttttctaactatggatctgggcttgaagttatggcaccgggcagcaacatctacagtacgtatcctaattccagatatacatctttgagtggtacaagcatggctactccgcacgttgcgggcgtagctgggctcattcgcgcagccaacccagacatatctgtcgcgcaagcccgtcagattctgcgggataccgcgcaagaagcaggatcgttcacacagtacggctatggaatcgtcgatgctcatgccgccgttgttgctgcatccggtggtagcggcggc

SEQ ID NO: 2018 - protein, 413 aa, synthetic construct
  REGION 1..413: note = Variant of serine peptidase from Bacillus sinesaloumensis
MADQASQANGNQDVIEGELIVSVEPKNGKPDVSIQSAQSVTGQEDVLKSKGFTIVDTLHVEDSSVKPLVSKNFNKKVVEKMGLVYLVQYSPDQFKSSNIAKKELRKELMDLGFKVRYISENYKMMAIEGTATLQAVHPNQNWHYNMIKAPEAWAITSGSSSVKVAVLDTGIDHNHPSLANFVNTNLGRSFVGGNTMDVQGHGTHVAGTIASYGSVSGVMQSATLIPVKVLDNSGSGSLYGITQGILYAADIDADVINMSLGGGGYNQSMDEATQTAVAQGTIVVAATGNDGASSISYPAAYSSVIAVGSVTSNRTRSSFSNYGSGLEVMAPGSNIYSTYPNSRYTSLSGTSMATPHVAGVAGLIRAANPDISVAQARQILRDTAQEAGSFTQYGYGIVDAHAAVVAASGGSGG

SEQ ID NO: 2019 - DNA, 1239 bp, synthetic construct
  misc_feature 1..1239: note = Variant of serine peptidase from Bacillus sinesaloumensis
  source 1..1239: mol_type = other DNA
atggcagatcaagctagtcaagctaatggaaaccaggacgtcattgaaggcgagctgatcgtttcagtggaaccgaagaacggtaaacctgatgtgagcattcaaagtgcacaatccgtaacagggcaggaagacgtccttaaatcgaaaggctttacgatcgttgataccttgcatgtagaggatagcagcgtcaagccactcgtctcgaagaatttcaataagaaagtggtggagaagatgggactggtgtatcttgttcaatactctccggaccagtttaaaagttccaacattgcgaagaaagaactcagaaaagaattgatggatctgggctttaaagtccgctatataagcgaaaattacaagatgatggcgatcgaaggtacagccactcttcaggcagtacaccctaaccaaaactggcattataatatgattaaagctccggaagcgtgggctattacgtctggatcctctagcgttaaagtagcagtcctggatacagggatcgaccataatcacccatccttggccaacttcgtgaatactaatcttggccggtcgtttgttggaggaaacaccatggatgttcaaggtcatggcacacatgttgctggcacgattgcatcttatgggagtgtaagcggagtgatgcagagtgcgacactgatcccggtcaaagtgctcgataattctggcagcgggtccctttacggtattacgcaaggcatattgtatgccgccgacatcgatgcggacgtcattaacatgtctctgggtggaggaggctataatcagagcatggatgaggctatgcaaacagcagttgctcagggaaccattgtagtagcagcgactggcaatgatggtgcatcgtcgatcagttatcctgctgcctacagcagcgtcattgcggtgggatctgtgacgtccaatcgtacacgatcctcgttttctaactatggatctgggcttgaagttatggcaccgggcagcaacatctacagtacgtatcctaattccagatatacatctttgagtggtacaagcatggctactccgcacgttgcgggcgtagctgggctcattcgcgcagccaacccagacatatctgtcgcgcaagcccgtcagattctgcgggataccgcgcaagaagcaggatcgttcacacagtacggctatggaatcgtcgatgctcatgccgccgttgttgctgcatccggtggtagcggcggc

SEQ ID NO: 2020 - protein, 413 aa, synthetic construct
  REGION 1..413: note = Variant of serine peptidase from Bacillus sinesaloumensis
MADQASQANGNQDVIEGELIVSVEPKNGKPDVSIQSAQSVTGQEDVLKSKGFTIVDTLHVEDSSVKPLVSKNFNKKVVEKMGLVYLVQYSPDQFKSSNIAKKELRKELMDLGFKVRYISENYKMMAIEGTATLQAVHPNQNWHYNMIKAPEAWAITSGSSSVKVAVLDTGIDHNHPSLANFVNTNLGRSFVGGNTMDVQGHGTHVAGTIASYGSVSGVMQSATLIPVKVLDNSGSGSLYGITQGILYAADIDADVINMSLGGGGYNQSMDEAMQTAVAQGTIVVAATGNDGASSISYPAAYSSVIAVGSVTSNRTRSSFSNYGSGLEVMAPGSNIYSTYPNSRYTSLSGTSMATPHVAGVAGLIRAANPDISVAQARQILRDTAQEAGSFTQYGYGIVDAHAAVVAASGGSGG

SEQ ID NO: 2021 - DNA, 1239 bp, synthetic construct
  misc_feature 1..1239: note = Variant of serine peptidase from Bacillus sinesaloumensis
  source 1..1239: mol_type = other DNA
atggcagatcaagctagtcaagctaatggaaaccaggacgtcattgaaggcgagctgatcgtttcagtggaaccgaagaacggtaaacctgatgtgagcattcaaagtgcacaatccgtaacagggcaggaagacgtccttaaatcgaaaggctttacgatcgttgataccttgcatgtagaggatagcagcgtcaagccactcgtctcgaagaatttcaataagaaagtggtggagaagatgggactggtgtatcttgttcaatactctccggaccagtttaaaagttccaacattgcgaagaaagaactcagaaaagaattgatggatctgggctttaaagtccgctatataagcgaaaattacaagatgatggcgatcgaaggtacagccactcttcaggcagtacaccctaaccaaaactggcattataatatgattaaagctccggaagcgtgggctattacgtctggatcctctagcgttaaagtagcagtcctggatacagggatcgaccataatcacccatccttggccaacttcgtgaatactaatcttggccggtcgtttgttggaggaaacaccatggatgttcaaggtcatggcacacatgttgctggcacgattgcatcttatgggagtgtaagcggagtgatgcagagtgcgacactgatcccggtcaaagtgctcgataattctggcagcgggtccctttacggtattacgcaaggcatattgtatgccgccgacatcgatgcggacgtcattaacatgtctctgggtggaggaggctataatcagagcatggatgaggctgttcaaacagcagttgctaggggaaccattgtagtagcagcgactggcaatgatggtgcatcgtcgatcagttatcctgctgcctacagcagcgtcattgcggtgggatctgtgacgtccaatcgtacacgatcctcgttttctaactatggatctgggcttgaagttatggcaccgggcagcaacatctacagtacgtatcctaattccagatatacatctttgagtggtacaagcatggctactccgcacgttgcgggcgtagctgggctcattcgcgcagccaacccagacatatctgtcgcgcaagcccgtcagattctgcgggataccgcgcaagaagcaggatcgttcacacagtacggctatggaatcgtcgatgctcatgccgccgttgttgctgcatccggtggtagcggcggc

SEQ ID NO: 2022 - protein, 413 aa, synthetic construct
  REGION 1..413: note = Variant of serine peptidase from Bacillus sinesaloumensis
MADQASQANGNQDVIEGELIVSVEPKNGKPDVSIQSAQSVTGQEDVLKSKGFTIVDTLHVEDSSVKPLVSKNFNKKVVEKMGLVYLVQYSPDQFKSSNIAKKELRKELMDLGFKVRYISENYKMMAIEGTATLQAVHPNQNWHYNMIKAPEAWAITSGSSSVKVAVLDTGIDHNHPSLANFVNTNLGRSFVGGNTMDVQGHGTHVAGTIASYGSVSGVMQSATLIPVKVLDNSGSGSLYGITQGILYAADIDADVINMSLGGGGYNQSMDEAVQTAVARGTIVVAATGNDGASSISYPAAYSSVIAVGSVTSNRTRSSFSNYGSGLEVMAPGSNIYSTYPNSRYTSLSGTSMATPHVAGVAGLIRAANPDISVAQARQILRDTAQEAGSFTQYGYGIVDAHAAVVAASGGSGG

SEQ ID NO: 2023 - DNA, 1239 bp, synthetic construct
  misc_feature 1..1239: note = Variant of serine peptidase from Bacillus sinesaloumensis
  source 1..1239: mol_type = other DNA
atggcagatcaagctagtcaagctaatggaaaccaggacgtcattgaaggcgagctgatcgtttcagtggaaccgaagaacggtaaacctgatgtgagcattcaaagtgcacaatccgtaacagggcaggaagacgtccttaaatcgaaaggctttacgatcgttgataccttgcatgtagaggatagcagcgtcaagccactcgtctcgaagaatttcaataagaaagtggtggagaagatgggactggtgtatcttgttcaatactctccggaccagtttaaaagttccaacattgcgaagaaagaactcagaaaagaattgatggatctgggctttaaagtccgctatataagcgaaaattacaagatgatggcgatcgaaggtacagccactcttcaggcagtacaccctaaccaaaactggcattataatatgattaaagctccggaagcgtgggctattacgtctggatcctctagcgttaaagtagcagtcctggatacagggatcgaccataatcacccatccttggccaacttcgtgaatactaatcttggccggtcgtttgttggaggaaacaccatggatgttcaaggtcatggcacacatgttgctggcacgattgcatcttatgggagtgtaagcggagtgatgcagagtgcgacactgatcccggtcaaagtgctcgataattctggcagcgggtccctttacggtattacgcaaggcatattgtatgccgccgacatcgatgcggacgtcattaacatgtctctgggtggaggaggctataatcagagcatggatgaggctgttcaaacagcagttgctgagggaaccattgtagtagcagcgactggcaatgatggtgcatcgtcgatcagttatcctgctgcctacagcagcgtcattgcggtgggatctgtgacgtccaatcgtacacgatcctcgttttctaactatggatctgggcttgaagttatggcaccgggcagcaacatctacagtacgtatcctaattccagatatacatctttgagtggtacaagcatggctactccgcacgttgcgggcgtagctgggctcattcgcgcagccaacccagacatatctgtcgcgcaagcccgtcagattctgcgggataccgcgcaagaagcaggatcgttcacacagtacggctatggaatcgtcgatgctcatgccgccgttgttgctgcatccggtggtagcggcggc

SEQ ID NO: 2024 - protein, 413 aa, synthetic construct
  REGION 1..413: note = Variant of serine peptidase from Bacillus sinesaloumensis
MADQASQANGNQDVIEGELIVSVEPKNGKPDVSIQSAQSVTGQEDVLKSKGFTIVDTLHVEDSSVKPLVSKNFNKKVVEKMGLVYLVQYSPDQFKSSNIAKKELRKELMDLGFKVRYISENYKMMAIEGTATLQAVHPNQNWHYNMIKAPEAWAITSGSSSVKVAVLDTGIDHNHPSLANFVNTNLGRSFVGGNTMDVQGHGTHVAGTIASYGSVSGVMQSATLIPVKVLDNSGSGSLYGITQGILYAADIDADVINMSLGGGGYNQSMDEAVQTAVAEGTIVVAATGNDGASSISYPAAYSSVIAVGSVTSNRTRSSFSNYGSGLEVMAPGSNIYSTYPNSRYTSLSGTSMATPHVAGVAGLIRAANPDISVAQARQILRDTAQEAGSFTQYGYGIVDAHAAVVAASGGSGG

SEQ ID NO: 2025 - DNA, 1239 bp, synthetic construct
  misc_feature 1..1239: note = Variant of serine peptidase from Bacillus sinesaloumensis
  source 1..1239: mol_type = other DNA
atggcagatcaagctagtcaagctaatggaaaccaggacgtcattgaaggcgagctgatcgtttcagtggaaccgaagaacggtaaacctgatgtgagcattcaaagtgcacaatccgtaacagggcaggaagacgtccttaaatcgaaaggctttacgatcgttgataccttgcatgtagaggatagcagcgtcaagccactcgtctcgaagaatttcaataagaaagtggtggagaagatgggactggtgtatcttgttcaatactctccggaccagtttaaaagttccaacattgcgaagaaagaactcagaaaagaattgatggatctgggctttaaagtccgctatataagcgaaaattacaagatgatggcgatcgaaggtacagccactcttcaggcagtacaccctaaccaaaactggcattataatatgattaaagctccggaagcgtgggctattacgtctggatcctctagcgttaaagtagcagtcctggatacagggatcgaccataatcacccatccttggccaacttcgtgaatactaatcttggccggtcgtttgttggaggaaacaccatggatgttcaaggtcatggcacacatgttgctggcacgattgcatcttatgggagtgtaagcggagtgatgcagagtgcgacactgatcccggtcaaagtgctcgataattctggcagcgggtccctttacggtattacgcaaggcatattgtatgccgccgacatcgatgcggacgtcattaacatgtctctgggtggaggaggctataatcagagcatggatgaggctgttcaaacagcagttgcttttggaaccattgtagtagcagcgactggcaatgatggtgcatcgtcgatcagttatcctgctgcctacagcagcgtcattgcggtgggatctgtgacgtccaatcgtacacgatcctcgttttctaactatggatctgggcttgaagttatggcaccgggcagcaacatctacagtacgtatcctaattccagatatacatctttgagtggtacaagcatggctactccgcacgttgcgggcgtagctgggctcattcgcgcagccaacccagacatatctgtcgcgcaagcccgtcagattctgcgggataccgcgcaagaagcaggatcgttcacacagtacggctatggaatcgtcgatgctcatgccgccgttgttgctgcatccggtggtagcggcggc

SEQ ID NO: 2026 - protein, 413 aa, synthetic construct
  REGION 1..413: note = Variant of serine peptidase from Bacillus sinesaloumensis
MADQASQANGNQDVIEGELIVSVEPKNGKPDVSIQSAQSVTGQEDVLKSKGFTIVDTLHVEDSSVKPLVSKNFNKKVVEKMGLVYLVQYSPDQFKSSNIAKKELRKELMDLGFKVRYISENYKMMAIEGTATLQAVHPNQNWHYNMIKAPEAWAITSGSSSVKVAVLDTGIDHNHPSLANFVNTNLGRSFVGGNTMDVQGHGTHVAGTIASYGSVSGVMQSATLIPVKVLDNSGSGSLYGITQGILYAADIDADVINMSLGGGGYNQSMDEAVQTAVAFGTIVVAATGNDGASSISYPAAYSSVIAVGSVTSNRTRSSFSNYGSGLEVMAPGSNIYSTYPNSRYTSLSGTSMATPHVAGVAGLIRAANPDISVAQARQILRDTAQEAGSFTQYGYGIVDAHAAVVAASGGSGG

SEQ ID NO: 2027 - DNA, 1239 bp, synthetic construct
  misc_feature 1..1239: note = Variant of serine peptidase from Bacillus sinesaloumensis
  source 1..1239: mol_type = other DNA
atggcagatcaagctagtcaagctaatggaaaccaggacgtcattgaaggcgagctgatcgtttcagtggaaccgaagaacggtaaacctgatgtgagcattcaaagtgcacaatccgtaacagggcaggaagacgtccttaaatcgaaaggctttacgatcgttgataccttgcatgtagaggatagcagcgtcaagccactcgtctcgaagaatttcaataagaaagtggtggagaagatgggactggtgtatcttgttcaatactctccggaccagtttaaaagttccaacattgcgaagaaagaactcagaaaagaattgatggatctgggctttaaagtccgctatataagcgaaaattacaagatgatggcgatcgaaggtacagccactcttcaggcagtacaccctaaccaaaactggcattataatatgattaaagctccggaagcgtgggctattacgtctggatcctctagcgttaaagtagcagtcctggatacagggatcgaccataatcacccatccttggccaacttcgtgaatactaatcttggccggtcgtttgttggaggaaacaccatggatgttcaaggtcatggcacacatgttgctggcacgattgcatcttatgggagtgtaagcggagtgatgcagagtgcgacactgatcccggtcaaagtgctcgataattctggcagcgggtccctttacggtattacgcaaggcatattgtatgccgccgacatcgatgcggacgtcattaacatgtctctgggtggaggaggctataatcagagcatggatgaggctgttcaaacagcagttgctgggggaaccattgtagtagcagcgactggcaatgatggtgcatcgtcgatcagttatcctgctgcctacagcagcgtcattgcggtgggatctgtgacgtccaatcgtacacgatcctcgttttctaactatggatctgggcttgaagttatggcaccgggcagcaacatctacagtacgtatcctaattccagatatacatctttgagtggtacaagcatggctactccgcacgttgcgggcgtagctgggctcattcgcgcagccaacccagacatatctgtcgcgcaagcccgtcagattctgcgggataccgcgcaagaagcaggatcgttcacacagtacggctatggaatcgtcgatgctcatgccgccgttgttgctgcatccggtggtagcggcggc

SEQ ID NO: 2028 - protein, 413 aa, synthetic construct
  REGION 1..413: note = Variant of serine peptidase from Bacillus sinesaloumensis
MADQASQANGNQDVIEGELIVSVEPKNGKPDVSIQSAQSVTGQEDVLKSKGFTIVDTLHVEDSSVKPLVSKNFNKKVVEKMGLVYLVQYSPDQFKSSNIAKKELRKELMDLGFKVRYISENYKMMAIEGTATLQAVHPNQNWHYNMIKAPEAWAITSGSSSVKVAVLDTGIDHNHPSLANFVNTNLGRSFVGGNTMDVQGHGTHVAGTIASYGSVSGVMQSATLIPVKVLDNSGSGSLYGITQGILYAADIDADVINMSLGGGGYNQSMDEAVQTAVAGGTIVVAATGNDGASSISYPAAYSSVIAVGSVTSNRTRSSFSNYGSGLEVMAPGSNIYSTYPNSRYTSLSGTSMATPHVAGVAGLIRAANPDISVAQARQILRDTAQEAGSFTQYGYGIVDAHAAVVAASGGSGG

SEQ ID NO: 2029 - DNA, 1239 bp, synthetic construct; identical to SEQ ID NO: 351
  misc_feature 1..1239: note = Variant of serine peptidase from Bacillus sinesaloumensis
  source 1..1239: mol_type = other DNA

SEQ ID NO: 2030 - protein, 413 aa, synthetic construct; identical to SEQ ID NO: 352
  REGION 1..413: note = Variant of serine peptidase from Bacillus sinesaloumensis

SEQ ID NO: 2031 - DNA, 1239 bp, synthetic construct; identical to SEQ ID NO: 507
  misc_feature 1..1239: note = Variant of serine peptidase from Bacillus sinesaloumensis
  source 1..1239: mol_type = other DNA

SEQ ID NO: 2032 - protein, 413 aa, synthetic construct; identical to SEQ ID NO: 508
  REGION 1..413: note = Variant of serine peptidase from Bacillus sinesaloumensis

SEQ ID NO: 2033 - DNA, 1239 bp, synthetic construct; identical to SEQ ID NO: 513
  misc_feature 1..1239: note = Variant of serine peptidase from Bacillus sinesaloumensis
  source 1..1239: mol_type = other DNA

SEQ ID NO: 2034 - protein, 413 aa, synthetic construct; identical to SEQ ID NO: 514
  REGION 1..413: note = Variant of serine peptidase from Bacillus sinesaloumensis

SEQ ID NO: 2035 - DNA, 1239 bp, synthetic construct; identical to SEQ ID NO: 317
  misc_feature 1..1239: note = Variant of serine peptidase from Bacillus sinesaloumensis
  source 1..1239: mol_type = other DNA

SEQ ID NO: 2036 - protein, 413 aa, synthetic construct; identical to SEQ ID NO: 318
  REGION 1..413: note = Variant of serine peptidase from Bacillus sinesaloumensis

SEQ ID NO: 2037 - DNA, 1239 bp, synthetic construct
  misc_feature 1..1239: note = Variant of serine peptidase from Bacillus sinesaloumensis
  source 1..1239: mol_type = other DNA
atggcagatcaagctagtcaagctaatggaaaccaggacgtcattgaaggcgagctgatcgtttcagtggaaccgaagaacggtaaacctgatgtgagcattcaaagtgcacaatccgtaacagggcaggaagacgtccttaaatcgaaaggctttacgatcgttgataccttgcatgtagaggatagcagcgtcaagccactcgtctcgaagaatttcaataagaaagtggtggagaagatgggactggtgtatcttgttcaatactctccggaccagtttaaaagttccaacattgcgaagaaagaactcagaaaagaattgatggatctgggctttaaagtccgctatataagcgaaaattacaagatgatggcgatcgaaggtacagccactcttcaggcagtacaccctaaccaaaactggcattataatatgattaaagctccggaagcgtgggctattacgtctggatcctctagcgttaaagtagcagtcctggatacagggatcgaccataatcacccatccttggccaacttcgtgaatactaatcttggccggtcgtttgttggaggaaacaccatggatgttcaaggtcatggcacacatgttgctggcacgattgcatcttatgggagtgtaagcggagtgatgcagagtgcgacactgatcccggtcaaagtgctcgataattctggcagcgggtccctttacggtattacgcaaggcatattgtatgccgccgacatcgatgcggacgtcattaacatgtctctgggtggaggaggctataatcagagcatggatgaggctgttcaaacagcagttgctgctggaaccattgtagtagcagcgactggcaatgatggtgcatcgtcgatcagttatcctgctgcctacagcagcgtcattgcggtgggatctgtgacgtccaatcgtacacgatcctcgttttctaactatggatctgggcttgaagttatggcaccgggcagcaacatctacagtacgtatcctaattccagatatacatctttgagtggtacaagcatggctactccgcacgttgcgggcgtagctgggctcattcgcgcagccaacccagacatatctgtcgcgcaagcccgtcagattctgcgggataccgcgcaagaagcaggatcgttcacacagtacggctatggaatcgtcgatgctcatgccgccgttgttgctgcatccggtggtagcggcggc

SEQ ID NO: 2038 - protein, 413 aa, synthetic construct
  REGION 1..413: note = Variant of serine peptidase from Bacillus sinesaloumensis
MADQASQANGNQDVIEGELIVSVEPKNGKPDVSIQSAQSVTGQEDVLKSKGFTIVDTLHVEDSSVKPLVSKNFNKKVVEKMGLVYLVQYSPDQFKSSNIAKKELRKELMDLGFKVRYISENYKMMAIEGTATLQAVHPNQNWHYNMIKAPEAWAITSGSSSVKVAVLDTGIDHNHPSLANFVNTNLGRSFVGGNTMDVQGHGTHVAGTIASYGSVSGVMQSATLIPVKVLDNSGSGSLYGITQGILYAADIDADVINMSLGGGGYNQSMDEAVQTAVAAGTIVVAATGNDGASSISYPAAYSSVIAVGSVTSNRTRSSFSNYGSGLEVMAPGSNIYSTYPNSRYTSLSGTSMATPHVAGVAGLIRAANPDISVAQARQILRDTAQEAGSFTQYGYGIVDAHAAVVAASGGSGG

SEQ ID NO: 2039 - DNA, 1239 bp, synthetic construct
  misc_feature 1..1239: note = Variant of serine peptidase from Bacillus sinesaloumensis
  source 1..1239: mol_type = other DNA
atggcagatcaagctagtcaagctaatggaaaccaggacgtcattgaaggcgagctgatcgtttcagtggaaccgaagaacggtaaacctgatgtgagcattcaaagtgcacaatccgtaacagggcaggaagacgtccttaaatcgaaaggctttacgatcgttgataccttgcatgtagaggatagcagcgtcaagccactcgtctcgaagaatttcaataagaaagtggtggagaagatgggactggtgtatcttgttcaatactctccggaccagtttaaaagttccaacattgcgaagaaagaactcagaaaagaattgatggatctgggctttaaagtccgctatataagcgaaaattacaagatgatggcgatcgaaggtacagccactcttcaggcagtacaccctaaccaaaactggcattataatatgattaaagctccggaagcgtgggctattacgtctggatcctctagcgttaaagtagcagtcctggatacagggatcgaccataatcacccatccttggccaacttcgtgaatactaatcttggccggtcgtttgttggaggaaacaccatggatgttcaaggtcatggcacacatgttgctggcacgattgcatcttatgggagtgtaagcggagtgatgcagagtgcgacactgatcccggtcaaagtgctcgataattctggcagcgggtccctttacggtattacgcaaggcatattgtatgccgccgacatcgatgcggacgtcattaacatgtctctgggtggaggaggctataatcagagcatggatgaggctgttcaaacagcagttgctaagggaaccattgtagtagcagcgactggcaatgatggtgcatcgtcgatcagttatcctgctgcctacagcagcgtcattgcggtgggatctgtgacgtccaatcgtacacgatcctcgttttctaactatggatctgggcttgaagttatggcaccgggcagcaacatctacagtacgtatcctaattccagatatacatctttgagtggtacaagcatggctactccgcacgttgcgggcgtagctgggctcattcgcgcagccaacccagacatatctgtcgcgcaagcccgtcagattctgcgggataccgcgcaagaagcaggatcgttcacacagtacggctatggaatcgtcgatgctcatgccgccgttgttgctgcatccggtggtagcggcggc

SEQ ID NO: 2040 - protein, 413 aa, synthetic construct
  REGION 1..413: note = Variant of serine peptidase from Bacillus sinesaloumensis
MADQASQANGNQDVIEGELIVSVEPKNGKPDVSIQSAQSVTGQEDVLKSKGFTIVDTLHVEDSSVKPLVSKNFNKKVVEKMGLVYLVQYSPDQFKSSNIAKKELRKELMDLGFKVRYISENYKMMAIEGTATLQAVHPNQNWHYNMIKAPEAWAITSGSSSVKVAVLDTGIDHNHPSLANFVNTNLGRSFVGGNTMDVQGHGTHVAGTIASYGSVSGVMQSATLIPVKVLDNSGSGSLYGITQGILYAADIDADVINMSLGGGGYNQSMDEAVQTAVAKGTIVVAATGNDGASSISYPAAYSSVIAVGSVTSNRTRSSFSNYGSGLEVMAPGSNIYSTYPNSRYTSLSGTSMATPHVAGVAGLIRAANPDISVAQARQILRDTAQEAGSFTQYGYGIVDAHAAVVAASGGSGG

SEQ ID NO: 2041 - DNA, 1239 bp, synthetic construct
  misc_feature 1..1239: note = Variant of serine peptidase from Bacillus sinesaloumensis
  source 1..1239: mol_type = other DNA
atggcagatcaagctagtcaagctaatggaaaccaggacgtcattgaaggcgagctgatcgtttcagtggaaccgaagaacggtaaacctgatgtgagcattcaaagtgcacaatccgtaacagggcaggaagacgtccttaaatcgaaaggctttacgatcgttgataccttgcatgtagaggatagcagcgtcaagccactcgtctcgaagaatttcaataagaaagtggtggagaagatgggactggtgtatcttgttcaatactctccggaccagtttaaaagttccaacattgcgaagaaagaactcagaaaagaattgatggatctgggctttaaagtccgctatataagcgaaaattacaagatgatggcgatcgaaggtacagccactcttcaggcagtacaccctaaccaaaactggcattataatatgattaaagctccggaagcgtgggctattacgtctggatcctctagcgttaaagtagcagtcctggatacagggatcgaccataatcacccatccttggccaacttcgtgaatactaatcttggccggtcgtttgttggaggaaacaccatggatgttcaaggtcatggcacacatgttgctggcacgattgcatcttatgggagtgtaagcggagtgatgcagagtgcgacactgatcccggtcaaagtgctcgataattctggcagcgggtccctttacggtattacgcaaggcatattgtatgccgccgacatcgatgcggacgtcattaacatgtctctgggtggaggaggctataatcagagcatggatgaggctgttcaaacagcagttgctgtgggaaccattgtagtagcagcgactggcaatgatggtgcatcgtcgatcagttatcctgctgcctacagcagcgtcattgcggtgggatctgtgacgtccaatcgtacacgatcctcgttttctaactatggatctgggcttgaagttatggcaccgggcagcaacatctacagtacgtatcctaattccagatatacatctttgagtggtacaagcatggctactccgcacgttgcgggcgtagctgggctcattcgcgcagccaacccagacatatctgtcgcgcaagcccgtcagattctgcgggataccgcgcaagaagcaggatcgttcacacagtacggctatggaatcgtcgatgctcatgccgccgttgttgctgcatccggtggtagcggcggc

SEQ ID NO: 2042 - protein, 413 aa, synthetic construct
  REGION 1..413: note = Variant of serine peptidase from Bacillus sinesaloumensis
MADQASQANGNQDVIEGELIVSVEPKNGKPDVSIQSAQSVTGQEDVLKSKGFTIVDTLHVEDSSVKPLVSKNFNKKVVEKMGLVYLVQYSPDQFKSSNIAKKELRKELMDLGFKVRYISENYKMMAIEGTATLQAVHPNQNWHYNMIKAPEAWAITSGSSSVKVAVLDTGIDHNHPSLANFVNTNLGRSFVGGNTMDVQGHGTHVAGTIASYGSVSGVMQSATLIPVKVLDNSGSGSLYGITQGILYAADIDADVINMSLGGGGYNQSMDEAVQTAVAVGTIVVAATGNDGASSISYPAAYSSVIAVGSVTSNRTRSSFSNYGSGLEVMAPGSNIYSTYPNSRYTSLSGTSMATPHVAGVAGLIRAANPDISVAQARQILRDTAQEAGSFTQYGYGIVDAHAAVVAASGGSGG

SEQ ID NO: 2043 - DNA, 1239 bp, synthetic construct
  misc_feature 1..1239: note = Variant of serine peptidase from Bacillus sinesaloumensis
  source 1..1239: mol_type = other DNA
atggcagatcaagctagtcaagctaatggaaaccaggacgtcattgaaggcgagctgatcgtttcagtggaaccgaagaacggtaaacctgatgtgagcattcaaagtgcacaatccgtaacagggcaggaagacgtccttaaatcgaaaggctttacgatcgttgataccttgcatgtagaggatagcagcgtcaagccactcgtctcgaagaatttcaataagaaagtggtggagaagatgggactggtgtatcttgttcaatactctccggaccagtttaaaagttccaacattgcgaagaaagaactcagaaaagaattgatggatctgggctttaaagtccgctatataagcgaaaattacaagatgatggcgatcgaaggtacagccactcttcaggcagtacaccctaaccaaaactggcattataatatgattaaagctccggaagcgtgggctattacgtctggatcctctagcgttaaagtagcagtcctggatacagggatcgaccataatcacccatccttggccaacttcgtgaatactaatcttggccggtcgtttgttggaggaaacaccatggatgttcaaggtcatggcacacatgttgctggcacgattgcatcttatgggagtgtaagcggagtgatgcagagtgcgacactgatcccggtcaaagtgctcgataattctggcagcgggtccctttacggtattacgcaaggcatattgtatgccgccgacatcgatgcggacgtcattaacatgtctctgggtggaggaggctataatcagagcatggatgaggctgttcaaacagcagttgcttggggaaccattgtagtagcagcgactggcaatgatggtgcatcgtcgatcagttatcctgctgcctacagcagcgtcattgcggtgggatctgtgacgtccaatcgtacacgatcctcgttttctaactatggatctgggcttgaagttatggcaccgggcagcaacatctacagtacgtatcctaattccagatatacatctttgagtggtacaagcatggctactccgcacgttgcgggcgtagctgggctcattcgcgcagccaacccagacatatctgtcgcgcaagcccgtcagattctgcgggataccgcgcaagaagcaggatcgttcacacagtacggctatggaatcgtcgatgctcatgccgccgttgttgctgcatccggtggtagcggcggc

SEQ ID NO: 2044 - protein, 413 aa, synthetic construct
  REGION 1..413: note = Variant of serine peptidase from Bacillus sinesaloumensis
MADQASQANGNQDVIEGELIVSVEPKNGKPDVSIQSAQSVTGQEDVLKSKGFTIVDTLHVEDSSVKPLVSKNFNKKVVEKMGLVYLVQYSPDQFKSSNIAKKELRKELMDLGFKVRYISENYKMMAIEGTATLQAVHPNQNWHYNMIKAPEAWAITSGSSSVKVAVLDTGIDHNHPSLANFVNTNLGRSFVGGNTMDVQGHGTHVAGTIASYGSVSGVMQSATLIPVKVLDNSGSGSLYGITQGILYAADIDADVINMSLGGGGYNQSMDEAVQTAVAWGTIVVAATGNDGASSISYPAAYSSVIAVGSVTSNRTRSSFSNYGSGLEVMAPGSNIYSTYPNSRYTSLSGTSMATPHVAGVAGLIRAANPDISVAQARQILRDTAQEAGSFTQYGYGIVDAHAAVVAASGGSGG

SEQ ID NO: 2045 - DNA, 1239 bp, synthetic construct; identical to SEQ ID NO: 187
  misc_feature 1..1239: note = Variant of serine peptidase from Bacillus sinesaloumensis
  source 1..1239: mol_type = other DNA

SEQ ID NO: 2046 - protein, 413 aa, synthetic construct; identical to SEQ ID NO: 188
  REGION 1..413: note = Variant of serine peptidase from Bacillus sinesaloumensis

SEQ ID NO: 2047 - DNA, 1239 bp, synthetic construct; identical to SEQ ID NO: 315
  misc_feature 1..1239: note = Variant of serine peptidase from Bacillus sinesaloumensis
  source 1..1239: mol_type = other DNA

SEQ ID NO: 2048 - protein, 413 aa, synthetic construct; identical to SEQ ID NO: 316
  REGION 1..413: note = Variant of serine peptidase from Bacillus sinesaloumensis

SEQ ID NO: 2049 - DNA, 1239 bp, synthetic construct
  misc_feature 1..1239: note = Variant of serine peptidase from Bacillus sinesaloumensis
  source 1..1239: mol_type = other DNA
atggcagatcaagctagtcaagctaatggaaaccaggacgtcattgaaggcgagctgatcgtttcagtggaaccgaagaacggtaaacctgatgtgagcattcaaagtgcacaatccgtaacagggcaggaagacgtccttaaatcgaaaggctttacgatcgttgataccttgcatgtagaggatagcagcgtcaagccactcgtctcgaagaatttcaataagaaagtggtggagaagatgggactggtgtatcttgttcaatactctccggaccagtttaaaagttccaacattgcgaagaaagaactcagaaaagaattgatggatctgggctttaaagtccgctatataagcgaaaattacaagatgatggcgatcgaaggtacagccactcttcaggcagtacaccctaaccaaaactggcattataatatgattaaagctccggaagcgtgggctattacgtctggatcctctagcgttaaagtagcagtcctggatacagggatcgaccataatcacccatccttggccaacttcgtgaatactaatcttggccggtcgtttgttggaggaaacaccatggatgttcaaggtcatggcacacatgttgctggcacgattgcatcttatgggagtgtaagcggagtgatgcagagtgcgacactgatcccggtcaaagtgctcgataattctggcagcgggtccctttacggtattacgcaaggcatattgtatgccgccgacatcgatgcggacgtcattaacatgtctctgggtggaggaggctataatcagagcatggatgaggctgttcaaacagcagttgctcagggaaccattgtagtagcagcgactggcaatgatggtgcatcgtcgatcagttatcctgctgcctacagcagcgtcattgcggtgggatctgtgtcgtccaatcgtacacgatcctcgttttctaactatggatctgggcttgaagttatggcaccgggcagcaacatctacagtacgtatcctaattccagatatacatctttgagtggtacaagcatggctactccgcacgttgcgggcgtagctgggctcattcgcgcagccaacccagacatatctgtcgcgcaagcccgtcagattctgcgggataccgcgcaagaagcaggatcgttcacacagtacggctatggaatcgtcgatgctcatgccgccgttgttgctgcatccggtggtagcggcggc

SEQ ID NO: 2050 - protein, 413 aa, synthetic construct
  REGION 1..413: note = Variant of serine peptidase from Bacillus sinesaloumensis
MADQASQANGNQDVIEGELIVSVEPKNGKPDVSIQSAQSVTGQEDVLKSKGFTIVDTLHVEDSSVKPLVSKNFNKKVVEKMGLVYLVQYSPDQFKSSNIAKKELRKELMDLGFKVRYISENYKMMAIEGTATLQAVHPNQNWHYNMIKAPEAWAITSGSSSVKVAVLDTGIDHNHPSLANFVNTNLGRSFVGGNTMDVQGHGTHVAGTIASYGSVSGVMQSATLIPVKVLDNSGSGSLYGITQGILYAADIDADVINMSLGGGGYNQSMDEAVQTAVAQGTIVVAATGNDGASSISYPAAYSSVIAVGSVSSNRTRSSFSNYGSGLEVMAPGSNIYSTYPNSRYTSLSGTSMATPHVAGVAGLIRAANPDISVAQARQILRDTAQEAGSFTQYGYGIVDAHAAVVAASGGSGG

SEQ ID NO: 2051 - DNA, 1239 bp, synthetic construct
  misc_feature 1..1239: note = Variant of serine peptidase from Bacillus sinesaloumensis
  source 1..1239: mol_type = other DNA
atggcagatcaagctagtcaagctaatggaaaccaggacgtcattgaaggcgagctgatcgtttcagtggaaccgaagaacggtaaacctgatgtgagcattcaaagtgcacaatccgtaacagggcaggaagacgtccttaaatcgaaaggctttacgatcgttgataccttgcatgtagaggatagcagcgtcaagccactcgtctcgaagaatttcaataagaaagtggtggagaagatgggactggtgtatcttgttcaatactctccggaccagtttaaaagttccaacattgcgaagaaagaactcagaaaagaattgatggatctgggctttaaagtccgctatataagcgaaaattacaagatgatggcgatcgaaggtacagccactcttcaggcagtacaccctaaccaaaactggcattataatatgattaaagctccggaagcgtgggctattacgtctggatcctctagcgttaaagtagcagtcctggatacagggatcgaccataatcacccatccttggccaacttcgtgaatactaatcttggccggtcgtttgttggaggaaacaccatggatgttcaaggtcatggcacacatgttgctggcacgattgcatcttatgggagtgtaagcggagtgatgcagagtgcgacactgatcccggtcaaagtgctcgataattctggcagcgggtccctttacggtattacgcaaggcatattgtatgccgccgacatcgatgcggacgtcattaacatgtctctgggtggaggaggctataatcagagcatggatgaggctgttcaaacagcagttgctcagggaaccattgtagtagcagcgactggcaatgatggtgcatcgtcgatcagttatcctgctgcctacagcagcgtcattgcggtgggatctgtggattccaatcgtacacgatcctcgttttctaactatggatctgggcttgaagttatggcaccgggcagcaacatctacagtacgtatcctaattccagatatacatctttgagtggtacaagcatggctactccgcacgttgcgggcgtagctgggctcattcgcgcagccaacccagacatatctgtcgcgcaagcccgtcagattctgcgggataccgcgcaagaagcaggatcgttcacacagtacggctatggaatcgtcgatgctcatgccgccgttgttgctgcatccggtggtagcggcggc

SEQ ID NO: 2052 - protein, 413 aa, synthetic construct; identical to SEQ ID NO: 616
  REGION 1..413: note = Variant of serine peptidase from Bacillus sinesaloumensis

SEQ ID NO: 2053 - DNA, 1239 bp, synthetic construct
  misc_feature 1..1239: note = Variant of serine peptidase from Bacillus sinesaloumensis
  source 1..1239: mol_type = other DNA
atggcagatcaagctagtcaagctaatggaaaccaggacgtcattgaaggcgagctgatcgtttcagtggaaccgaagaacggtaaacctgatgtgagcattcaaagtgcacaatccgtaacagggcaggaagacgtccttaaatcgaaaggctttacgatcgttgataccttgcatgtagaggatagcagcgtcaagccactcgtctcgaagaatttcaataagaaagtggtggagaagatgggactggtgtatcttgttcaatactctccggaccagtttaaaagttccaacattgcgaagaaagaactcagaaaagaattgatggatctgggctttaaagtccgctatataagcgaaaattacaagatgatggcgatcgaaggtacagccactcttcaggcagtacaccctaaccaaaactggcattataatatgattaaagctccggaagcgtgggctattacgtctggatcctctagcgttaaagtagcagtcctggatacagggatcgaccataatcacccatccttggccaacttcgtgaatactaatcttggccggtcgtttgttggaggaaacaccatggatgttcaaggtcatggcacacatgttgctggcacgattgcatcttatgggagtgtaagcggagtgatgcagagtgcgacactgatcccggtcaaagtgctcgataattctggcagcgggtccctttacggtattacgcaaggcatattgtatgccgccgacatcgatgcggacgtcattaacatgtctctgggtggaggaggctataatcagagcatggatgaggctgttcaaacagcagttgctcagggaaccattgtagtagcagcgactggcaatgatggtgcatcgtcgatcagttatcctgctgcctacagcagcgtcattgcggtgggatctgtgcagtccaatcgtacacgatcctcgttttctaactatggatctgggcttgaagttatggcaccgggcagcaacatctacagtacgtatcctaattccagatatacatctttgagtggtacaagcatggctactccgcacgttgcgggcgtagctgggctcattcgcgcagccaacccagacatatctgtcgcgcaagcccgtcagattctgcgggataccgcgcaagaagcaggatcgttcacacagtacggctatggaatcgtcgatgctcatgccgccgttgttgctgcatccggtggtagcggcggc

SEQ ID NO: 2054 - protein, 413 aa, synthetic construct
  REGION 1..413: note = Variant of serine peptidase from Bacillus sinesaloumensis
MADQASQANGNQDVIEGELIVSVEPKNGKPDVSIQSAQSVTGQEDVLKSKGFTIVDTLHVEDSSVKPLVSKNFNKKVVEKMGLVYLVQYSPDQFKSSNIAKKELRKELMDLGFKVRYISENYKMMAIEGTATLQAVHPNQNWHYNMIKAPEAWAITSGSSSVKVAVLDTGIDHNHPSLANFVNTNLGRSFVGGNTMDVQGHGTHVAGTIASYGSVSGVMQSATLIPVKVLDNSGSGSLYGITQGILYAADIDADVINMSLGGGGYNQSMDEAVQTAVAQGTIVVAATGNDGASSISYPAAYSSVIAVGSVQSNRTRSSFSNYGSGLEVMAPGSNIYSTYPNSRYTSLSGTSMATPHVAGVAGLIRAANPDISVAQARQILRDTAQEAGSFTQYGYGIVDAHAAVVAASGGSGG

SEQ ID NO: 2055 - DNA, 1239 bp, synthetic construct
  misc_feature 1..1239: note = Variant of serine peptidase from Bacillus sinesaloumensis
  source 1..1239: mol_type = other DNA
atggcagatcaagctagtcaagctaatggaaaccaggacgtcattgaaggcgagctgatcgtttcagtggaaccgaagaacggtaaacctgatgtgagcattcaaagtgcacaatccgtaacagggcaggaagacgtccttaaatcgaaaggctttacgatcgttgataccttgcatgtagaggatagcagcgtcaagccactcgtctcgaagaatttcaataagaaagtggtggagaagatgggactggtgtatcttgttcaatactctccggaccagtttaaaagttccaacattgcgaagaaagaactcagaaaagaattgatggatctgggctttaaagtccgctatataagcgaaaattacaagatgatggcgatcgaaggtacagccactcttcaggcagtacaccctaaccaaaactggcattataatatgattaaagctccggaagcgtgggctattacgtctggatcctctagcgttaaagtagcagtcctggatacagggatcgaccataatcacccatccttggccaacttcgtgaatactaatcttggccggtcgtttgttggaggaaacaccatggatgttcaaggtcatggcacacatgttgctggcacgattgcatcttatgggagtgtaagcggagtgatgcagagtgcgacactgatcccggtcaaagtgctcgataattctggcagcgggtccctttacggtattacgcaaggcatattgtatgccgccgacatcgatgcggacgtcattaacatgtctctgggtggaggaggctataatcagagcatggatgaggctgttcaaacagcagttgctcagggaaccattgtagtagcagcgactggcaatgatggtgcatcgtcgatcagttatcctgctgcctacagcagcgtcattgcggtgggatctgtgatgtccaatcgtacacgatcctcgttttctaactatggatctgggcttgaagttatggcaccgggcagcaacatctacagtacgtatcctaattccagatatacatctttgagtggtacaagcatggctactccgcacgttgcgggcgtagctgggctcattcgcgcagccaacccagacatatctgtcgcgcaagcccgtcagattctgcgggataccgcgcaagaagcaggatcgttcacacagtacggctatggaatcgtcgatgctcatgccgccgttgttgctgcatccggtggtagcggcggc

SEQ ID NO: 2056 - protein, 413 aa, synthetic construct
  REGION 1..413: note = Variant of serine peptidase from Bacillus sinesaloumensis
MADQASQANGNQDVIEGELIVSVEPKNGKPDVSIQSAQSVTGQEDVLKSKGFTIVDTLHVEDSSVKPLVSKNFNKKVVEKMGLVYLVQYSPDQFKSSNIAKKELRKELMDLGFKVRYISENYKMMAIEGTATLQAVHPNQNWHYNMIKAPEAWAITSGSSSVKVAVLDTGIDHNHPSLANFVNTNLGRSFVGGNTMDVQGHGTHVAGTIASYGSVSGVMQSATLIPVKVLDNSGSGSLYGITQGILYAADIDADVINMSLGGGGYNQSMDEAVQTAVAQGTIVVAATGNDGASSISYPAAYSSVIAVGSVMSNRTRSSFSNYGSGLEVMAPGSNIYSTYPNSRYTSLSGTSMATPHVAGVAGLIRAANPDISVAQARQILRDTAQEAGSFTQYGYGIVDAHAAVVAASGGSGG

SEQ ID NO: 2057 - DNA, 1239 bp, synthetic construct
  misc_feature 1..1239: note = Variant of serine peptidase from Bacillus sinesaloumensis
  source 1..1239: mol_type = other DNA
atggcagatcaagctagtcaagctaatggaaaccaggacgtcattgaaggcgagctgatcgtttcagtggaaccgaagaacggtaaacctgatgtgagcattcaaagtgcacaatccgtaacagggcaggaagacgtccttaaatcgaaaggctttacgatcgttgataccttgcatgtagaggatagcagcgtcaagccactcgtctcgaagaatttcaataagaaagtggtggagaagatgggactggtgtatcttgttcaatactctccggaccagtttaaaagttccaacattgcgaagaaagaactcagaaaagaattgatggatctgggctttaaagtccgctatataagcgaaaattacaagatgatggcgatcgaaggtacagccactcttcaggcagtacaccctaaccaaaactggcattataatatgattaaagctccggaagcgtgggctattacgtctggatcctctagcgttaaagtagcagtcctggatacagggatcgaccataatcacccatccttggccaacttcgtgaatactaatcttggccggtcgtttgttggaggaaacaccatggatgttcaaggtcatggcacacatgttgctggcacgattgcatcttatgggagtgtaagcggagtgatgcagagtgcgacactgatcccggtcaaagtgctcgataattctggcagcgggtccctttacggtattacgcaaggcatattgtatgccgccgacatcgatgcggacgtcattaacatgtctctgggtggaggaggctataatcagagcatggatgaggctgttcaaacagcagttgctcagggaaccattgtagtagcagcgactggcaatgatggtgcatcgtcgatcagttatcctgctgcctacagcagcgtcattgcggtgggatctgtgaagtccaatcgtacacgatcctcgttttctaactatggatctgggcttgaagttatggcaccgggcagcaacatctacagtacgtatcctaattccagatatacatctttgagtggtacaagcatggctactccgcacgttgcgggcgtagctgggctcattcgcgcagccaacccagacatatctgtcgcgcaagcccgtcagattctgcgggataccgcgcaagaagcaggatcgttcacacagtacggctatggaatcgtcgatgctcatgccgccgttgttgctgcatccggtggtagcggcggc

SEQ ID NO: 2058 - protein, 413 aa, synthetic construct
  REGION 1..413: note = Variant of serine peptidase from Bacillus sinesaloumensis
MADQASQANGNQDVIEGELIVSVEPKNGKPDVSIQSAQSVTGQEDVLKSKGFTIVDTLHVEDSSVKPLVSKNFNKKVVEKMGLVYLVQYSPDQFKSSNIAKKELRKELMDLGFKVRYISENYKMMAIEGTATLQAVHPNQNWHYNMIKAPEAWAITSGSSSVKVAVLDTGIDHNHPSLANFVNTNLGRSFVGGNTMDVQGHGTHVAGTIASYGSVSGVMQSATLIPVKVLDNSGSGSLYGITQGILYAADIDADVINMSLGGGGYNQSMDEAVQTAVAQGTIVVAATGNDGASSISYPAAYSSVIAVGSVKSNRTRSSFSNYGSGLEVMAPGSNIYSTYPNSRYTSLSGTSMATPHVAGVAGLIRAANPDISVAQARQILRDTAQEAGSFTQYGYGIVDAHAAVVAASGGSGG

SEQ ID NO: 2059 - DNA, 1239 bp, synthetic construct
  misc_feature 1..1239: note = Variant of serine peptidase from Bacillus sinesaloumensis
  source 1..1239: mol_type = other DNA
atggcagatcaagctagtcaagctaatggaaaccaggacgtcattgaaggcgagctgatcgtttcagtggaaccgaagaacggtaaacctgatgtgagcattcaaagtgcacaatccgtaacagggcaggaagacgtccttaaatcgaaaggctttacgatcgttgataccttgcatgtagaggatagcagcgtcaagccactcgtctcgaagaatttcaataagaaagtggtggagaagatgggactggtgtatcttgttcaatactctccggaccagtttaaaagttccaacattgcgaagaaagaactcagaaaagaattgatggatctgggctttaaagtccgctatataagcgaaaattacaagatgatggcgatcgaaggtacagccactcttcaggcagtacaccctaaccaaaactggcattataatatgattaaagctccggaagcgtgggctattacgtctggatcctctagcgttaaagtagcagtcctggatacagggatcgaccataatcacccatccttggccaacttcgtgaatactaatcttggccggtcgtttgttggaggaaacaccatggatgttcaaggtcatggcacacatgttgctggcacgattgcatcttatgggagtgtaagcggagtgatgcagagtgcgacactgatcccggtcaaagtgctcgataattctggcagcgggtccctttacggtattacgcaaggcatattgtatgccgccgacatcgatgcggacgtcattaacatgtctctgggtggaggaggctataatcagagcatggatgaggctgttcaaacagcagttgctcagggaaccattgtagtagcagcgactggcaatgatggtgcatcgtcgatcagttatcctgctgcctacagcagcgtcattgcggtgggatctgtggggtccaatcgtacacgatcctcgttttctaactatggatctgggcttgaagttatggcaccgggcagcaacatctacagtacgtatcctaattccagatatacatctttgagtggtacaagcatggctactccgcacgttgcgggcgtagctgggctcattcgcgcagccaacccagacatatctgtcgcgcaagcccgtcagattctgcgggataccgcgcaagaagcaggatcgttcacacagtacggctatggaatcgtcgatgctcatgccgccgttgttgctgcatccggtggtagcggcggc

SEQ ID NO: 2060 - protein, 413 aa, synthetic construct
  REGION 1..413: note = Variant of serine peptidase from Bacillus sinesaloumensis
MADQASQANGNQDVIEGELIVSVEPKNGKPDVSIQSAQSVTGQEDVLKSKGFTIVDTLHVEDSSVKPLVSKNFNKKVVEKMGLVYLVQYSPDQFKSSNIAKKELRKELMDLGFKVRYISENYKMMAIEGTATLQAVHPNQNWHYNMIKAPEAWAITSGSSSVKVAVLDTGIDHNHPSLANFVNTNLGRSFVGGNTMDVQGHGTHVAGTIASYGSVSGVMQSATLIPVKVLDNSGSGSLYGITQGILYAADIDADVINMSLGGGGYNQSMDEAVQTAVAQGTIVVAATGNDGASSISYPAAYSSVIAVGSVGSNRTRSSFSNYGSGLEVMAPGSNIYSTYPNSRYTSLSGTSMATPHVAGVAGLIRAANPDISVAQARQILRDTAQEAGSFTQYGYGIVDAHAAVVAASGGSGG

SEQ ID NO: 2061 - DNA, 1239 bp, synthetic construct
  misc_feature 1..1239: note = Variant of serine peptidase from Bacillus sinesaloumensis
  source 1..1239: mol_type = other DNA
atggcagatcaagctagtcaagctaatggaaaccaggacgtcattgaaggcgagctgatcgtttcagtggaaccgaagaacggtaaacctgatgtgagcattcaaagtgcacaatccgtaacagggcaggaagacgtccttaaatcgaaaggctttacgatcgttgataccttgcatgtagaggatagcagcgtcaagccactcgtctcgaagaatttcaataagaaagtggtggagaagatgggactggtgtatcttgttcaatactctccggaccagtttaaaagttccaacattgcgaagaaagaactcagaaaagaattgatggatctgggctttaaagtccgctatataagcgaaaattacaagatgatggcgatcgaaggtacagccactcttcaggcagtacaccctaaccaaaactggcattataatatgattaaagctccggaagcgtgggctattacgtctggatcctctagcgttaaagtagcagtcctggatacagggatcgaccataatcacccatccttggccaacttcgtgaatactaatcttggccggtcgtttgttggaggaaacaccatggatgttcaaggtcatggcacacatgttgctggcacgattgcatcttatgggagtgtaagcggagtgatgcagagtgcgacactgatcccggtcaaagtgctcgataattctggcagcgggtccctttacggtattacgcaaggcatattgtatgccgccgacatcgatgcggacgtcattaacatgtctctgggtggaggaggctataatcagagcatggatgaggctgttcaaacagcagttgctcagggaaccattgtagtagcagcgactggcaatgatggtgcatcgtcgatcagttatcctgctgcctacagcagcgtcattgcggtgggatctgtggcgtccaatcgtacacgatcctcgttttctaactatggatctgggcttgaagttatggcaccgggcagcaacatctacagtacgtatcctaattccagatatacatctttgagtggtacaagcatggctactccgcacgttgcgggcgtagctgggctcattcgcgcagccaacccagacatatctgtcgcgcaagcccgtcagattctgcgggataccgcgcaagaagcaggatcgttcacacagtacggctatggaatcgtcgatgctcatgccgccgttgttgctgcatccggtggtagcggcggc

SEQ ID NO: 2062 - protein, 413 aa, synthetic construct
  REGION 1..413: note = Variant of serine peptidase from Bacillus sinesaloumensis
MADQASQANGNQDVIEGELIVSVEPKNGKPDVSIQSAQSVTGQEDVLKSKGFTIVDTLHVEDSSVKPLVSKNFNKKVVEKMGLVYLVQYSPDQFKSSNIAKKELRKELMDLGFKVRYISENYKMMAIEGTATLQAVHPNQNWHYNMIKAPEAWAITSGSSSVKVAVLDTGIDHNHPSLANFVNTNLGRSFVGGNTMDVQGHGTHVAGTIASYGSVSGVMQSATLIPVKVLDNSGSGSLYGITQGILYAADIDADVINMSLGGGGYNQSMDEAVQTAVAQGTIVVAATGNDGASSISYPAAYSSVIAVGSVASNRTRSSFSNYGSGLEVMAPGSNIYSTYPNSRYTSLSGTSMATPHVAGVAGLIRAANPDISVAQARQILRDTAQEAGSFTQYGYGIVDAHAAVVAASGGSGG

SEQ ID NO: 2063 - DNA, 1239 bp, synthetic construct
  misc_feature 1..1239: note = Variant of serine peptidase from Bacillus sinesaloumensis
  source 1..1239: mol_type = other DNA
atggcagatcaagctagtcaagctaatggaaaccaggacgtcattgaaggcgagctgatcgtttcagtggaaccgaagaacggtaaacctgatgtgagcattcaaagtgcacaatccgtaacagggcaggaagacgtccttaaatcgaaaggctttacgatcgttgataccttgcatgtagaggatagcagcgtcaagccactcgtctcgaagaatttcaataagaaagtggtggagaagatgggactggtgtatcttgttcaatactctccggaccagtttaaaagttccaacattgcgaagaaagaactcagaaaagaattgatggatctgggctttaaagtccgctatataagcgaaaattacaagatgatggcgatcgaaggtacagccactcttcaggcagtacaccctaaccaaaactggcattataatatgattaaagctccggaagcgtgggctattacgtctggatcctctagcgttaaagtagcagtcctggatacagggatcgaccataatcacccatccttggccaacttcgtgaatactaatcttggccggtcgtttgttggaggaaacaccatggatgttcaaggtcatggcacacatgttgctggcacgattgcatcttatgggagtgtaagcggagtgatgcagagtgcgacactgatcccggtcaaagtgctcgataattctggcagcgggtccctttacggtattacgcaaggcatattgtatgccgccgacatcgatgcggacgtcattaacatgtctctgggtggaggaggctataatcagagcatggatgaggctgttcaaacagcagttgctcagggaaccattgtagtagcagcgactggcaatgatggtgcatcgtcgatcagttatcctgctgcctacagcagcgtcattgcggtgggatctgtggagtccaatcgtacacgatcctcgttttctaactatggatctgggcttgaagttatggcaccgggcagcaacatctacagtacgtatcctaattccagatatacatctttgagtggtacaagcatggctactccgcacgttgcgggcgtagctgggctcattcgcgcagccaacccagacatatctgtcgcgcaagcccgtcagattctgcgggataccgcgcaagaagcaggatcgttcacacagtacggctatggaatcgtcgatgctcatgccgccgttgttgctgcatccggtggtagcggcggc

SEQ ID NO: 2064 - protein, 413 aa, synthetic construct
  REGION 1..413: note = Variant of serine peptidase from Bacillus sinesaloumensis
MADQASQANGNQDVIEGELIVSVEPKNGKPDVSIQSAQSVTGQEDVLKSKGFTIVDTLHVEDSSVKPLVSKNFNKKVVEKMGLVYLVQYSPDQFKSSNIAKKELRKELMDLGFKVRYISENYKMMAIEGTATLQAVHPNQNWHYNMIKAPEAWAITSGSSSVKVAVLDTGIDHNHPSLANFVNTNLGRSFVGGNTMDVQGHGTHVAGTIASYGSVSGVMQSATLIPVKVLDNSGSGSLYGITQGILYAADIDADVINMSLGGGGYNQSMDEAVQTAVAQGTIVVAATGNDGASSISYPAAYSSVIAVGSVESNRTRSSFSNYGSGLEVMAPGSNIYSTYPNSRYTSLSGTSMATPHVAGVAGLIRAANPDISVAQARQILRDTAQEAGSFTQYGYGIVDAHAAVVAASGGSGG

SEQ ID NO: 2065 - DNA, 1239 bp, synthetic construct
  misc_feature 1..1239: note = Variant of serine peptidase from Bacillus sinesaloumensis
  source 1..1239: mol_type = other DNA
atggcagatcaagctagtcaagctaatggaaaccaggacgtcattgaaggcgagctgatcgtttcagtggaaccgaagaacggtaaacctgatgtgagcattcaaagtgcacaatccgtaacagggcaggaagacgtccttaaatcgaaaggctttacgatcgttgataccttgcatgtagaggatagcagcgtcaagccactcgtctcgaagaatttcaataagaaagtggtggagaagatgggactggtgtatcttgttcaatactctccggaccagtttaaaagttccaacattgcgaagaaagaactcagaaaagaattgatggatctgggctttaaagtccgctatataagcgaaaattacaagatgatggcgatcgaaggtacagccactcttcaggcagtacaccctaaccaaaactggcattataatatgattaaagctccggaagcgtgggctattacgtctggatcctctagcgttaaagtagcagtcctggatacagggatcgaccataatcacccatccttggccaacttcgtgaatactaatcttggccggtcgtttgttggaggaaacaccatggatgttcaaggtcatggcacacatgttgctggcacgattgcatcttatgggagtgtaagcggagtgatgcagagtgcgacactgatcccggtcaaagtgctcgataattctggcagcgggtccctttacggtattacgcaaggcatattgtatgccgccgacatcgatgcggacgtcattaacatgtctctgggtggaggaggctataatcagagcatggatgaggctgttcaaacagcagttgctcagggaaccattgtagtagcagcgactggcaatgatggtgcatcgtcgatcagttatcctgctgcctacagcagcgtcattgcggtgggatctgtgacggttaatcgtacacgatcctcgttttctaactatggatctgggcttgaagttatggcaccgggcagcaacatctacagtacgtatcctaattccagatatacatctttgagtggtacaagcatggctactccgcacgttgcgggcgtagctgggctcattcgcgcagccaacccagacatatctgtcgcgcaagcccgtcagattctgcgggataccgcgcaagaagcaggatcgttcacacagtacggctatggaatcgtcgatgctcatgccgccgttgttgctgcatccggtggtagcggcggc

SEQ ID NO: 2066 - protein, 413 aa, synthetic construct
  REGION 1..413: note = Variant of serine peptidase from Bacillus sinesaloumensis
MADQASQANGNQDVIEGELIVSVEPKNGKPDVSIQSAQSVTGQEDVLKSKGFTIVDTLHVEDSSVKPLVSKNFNKKVVEKMGLVYLVQYSPDQFKSSNIAKKELRKELMDLGFKVRYISENYKMMAIEGTATLQAVHPNQNWHYNMIKAPEAWAITSGSSSVKVAVLDTGIDHNHPSLANFVNTNLGRSFVGGNTMDVQGHGTHVAGTIASYGSVSGVMQSATLIPVKVLDNSGSGSLYGITQGILYAADIDADVINMSLGGGGYNQSMDEAVQTAVAQGTIVVAATGNDGASSISYPAAYSSVIAVGSVTVNRTRSSFSNYGSGLEVMAPGSNIYSTYPNSRYTSLSGTSMATPHVAGVAGLIRAANPDISVAQARQILRDTAQEAGSFTQYGYGIVDAHAAVVAASGGSGG

SEQ ID NO: 2067 - DNA, 1239 bp, synthetic construct
  misc_feature 1..1239: note = Variant of serine peptidase from Bacillus sinesaloumensis
  source 1..1239: mol_type = other DNA
atggcagatcaagctagtcaagctaatggaaaccaggacgtcattgaaggcgagctgatcgtttcagtggaaccgaagaacggtaaacctgatgtgagcattcaaagtgcacaatccgtaacagggcaggaagacgtccttaaatcgaaaggctttacgatcgttgataccttgcatgtagaggatagcagcgtcaagccactcgtctcgaagaatttcaataagaaagtggtggagaagatgggactggtgtatcttgttcaatactctccggaccagtttaaaagttccaacattgcgaagaaagaactcagaaaagaattgatggatctgggctttaaagtccgctatataagcgaaaattacaagatgatggcgatcgaaggtacagccactcttcaggcagtacaccctaaccaaaactggcattataatatgattaaagctccggaagcgtgggctattacgtctggatcctctagcgttaaagtagcagtcctggatacagggatcgaccataatcacccatccttggccaacttcgtgaatactaatcttggccggtcgtttgttggaggaaacaccatggatgttcaaggtcatggcacacatgttgctggcacgattgcatcttatgggagtgtaagcggagtgatgcagagtgcgacactgatcccggtcaaagtgctcgataattctggcagcgggtccctttacggtattacgcaaggcatattgtatgccgccgacatcgatgcggacgtcattaacatgtctctgggtggaggaggctataatcagagcatggatgaggctgttcaaacagcagttgctcagggaaccattgtagtagcagcgactggcaatgatggtgcatcgtcgatcagttatcctgctgcctacagcagcgtcattgcggtgggatctgtgacggataatcgtacacgatcctcgttttctaactatggatctgggcttgaagttatggcaccgggcagcaacatctacagtacgtatcctaattccagatatacatctttgagtggtacaagcatggctactccgcacgttgcgggcgtagctgggctcattcgcgcagccaacccagacatatctgtcgcgcaagcccgtcagattctgcgggataccgcgcaagaagcaggatcgttcacacagtacggctatggaatcgtcgatgctcatgccgccgttgttgctgcatccggtggtagcggcggc

SEQ ID NO: 2068 - protein, 413 aa, synthetic construct
  REGION 1..413: note = Variant of serine peptidase from Bacillus sinesaloumensis
MADQASQANGNQDVIEGELIVSVEPKNGKPDVSIQSAQSVTGQEDVLKSKGFTIVDTLHVEDSSVKPLVSKNFNKKVVEKMGLVYLVQYSPDQFKSSNIAKKELRKELMDLGFKVRYISENYKMMAIEGTATLQAVHPNQNWHYNMIKAPEAWAITSGSSSVKVAVLDTGIDHNHPSLANFVNTNLGRSFVGGNTMDVQGHGTHVAGTIASYGSVSGVMQSATLIPVKVLDNSGSGSLYGITQGILYAADIDADVINMSLGGGGYNQSMDEAVQTAVAQGTIVVAATGNDGASSISYPAAYSSVIAVGSVTDNRTRSSFSNYGSGLEVMAPGSNIYSTYPNSRYTSLSGTSMATPHVAGVAGLIRAANPDISVAQARQILRDTAQEAGSFTQYGYGIVDAHAAVVAASGGSGG

SEQ ID NO: 2069 - DNA, 1239 bp, synthetic construct
  misc_feature 1..1239: note = Variant of serine peptidase from Bacillus sinesaloumensis
  source 1..1239: mol_type = other DNA
atggcagatcaagctagtcaagctaatggaaaccaggacgtcattgaaggcgagctgatcgtttcagtggaaccgaagaacggtaaacctgatgtgagcattcaaagtgcacaatccgtaacagggcaggaagacgtccttaaatcgaaaggctttacgatcgttgataccttgcatgtagaggatagcagcgtcaagccactcgtctcgaagaatttcaataagaaagtggtggagaagatgggactggtgtatcttgttcaatactctccggaccagtttaaaagttccaacattgcgaagaaagaactcagaaaagaattgatggatctgggctttaaagtccgctatataagcgaaaattacaagatgatggcgatcgaaggtacagccactcttcaggcagtacaccctaaccaaaactggcattataatatgattaaagctccggaagcgtgggctattacgtctggatcctctagcgttaaagtagcagtcctggatacagggatcgaccataatcacccatccttggccaacttcgtgaatactaatcttggccggtcgtttgttggaggaaacaccatggatgttcaaggtcatggcacacatgttgctggcacgattgcatcttatgggagtgtaagcggagtgatgcagagtgcgacactgatcccggtcaaagtgctcgataattctggcagcgggtccctttacggtattacgcaaggcatattgtatgccgccgacatcgatgcggacgtcattaacatgtctctgggtggaggaggctataatcagagcatggatgaggctgttcaaacagcagttgctcagggaaccattgtagtagcagcgactggcaatgatggtgcatcgtcgatcagttatcctgctgcctacagcagcgtcattgcggtgggatctgtgacggggaatcgtacacgatcctcgttttctaactatggatctgggcttgaagttatggcaccgggcagcaacatctacagtacgtatcctaattccagatatacatctttgagtggtacaagcatggctactccgcacgttgcgggcgtagctgggctcattcgcgcagccaacccagacatatctgtcgcgcaagcccgtcagattctgcgggataccgcgcaagaagcaggatcgttcacacagtacggctatggaatcgtcgatgctcatgccgccgttgttgctgcatccggtggtagcggcggc

SEQ ID NO: 2070 - protein, 413 aa, synthetic construct
  REGION 1..413: note = Variant of serine peptidase from Bacillus sinesaloumensis
MADQASQANGNQDVIEGELIVSVEPKNGKPDVSIQSAQSVTGQEDVLKSKGFTIVDTLHVEDSSVKPLVSKNFNKKVVEKMGLVYLVQYSPDQFKSSNIAKKELRKELMDLGFKVRYISENYKMMAIEGTATLQAVHPNQNWHYNMIKAPEAWAITSGSSSVKVAVLDTGIDHNHPSLANFVNTNLGRSFVGGNTMDVQGHGTHVAGTIASYGSVSGVMQSATLIPVKVLDNSGSGSLYGITQGILYAADIDADVINMSLGGGGYNQSMDEAVQTAVAQGTIVVAATGNDGASSISYPAAYSSVIAVGSVTGNRTRSSFSNYGSGLEVMAPGSNIYSTYPNSRYTSLSGTSMATPHVAGVAGLIRAANPDISVAQARQILRDTAQEAGSFTQYGYGIVDAHAAVVAASGGSGG

SEQ ID NO: 2071 - DNA, 1239 bp, synthetic construct
  misc_feature 1..1239: note = Variant of serine peptidase from Bacillus sinesaloumensis
  source 1..1239: mol_type = other DNA
atggcagatcaagctagtcaagctaatggaaaccaggacgtcattgaaggcgagctgatcgtttcagtggaaccgaagaacggtaaacctgatgtgagcattcaaagtgcacaatccgtaacagggcaggaagacgtccttaaatcgaaaggctttacgatcgttgataccttgcatgtagaggatagcagcgtcaagccactcgtctcgaagaatttcaataagaaagtggtggagaagatgggactggtgtatcttgttcaatactctccggaccagtttaaaagttccaacattgcgaagaaagaactcagaaaagaattgatggatctgggctttaaagtccgctatataagcgaaaattacaagatgatggcgatcgaaggtacagccactcttcaggcagtacaccctaaccaaaactggcattataatatgattaaagctccggaagcgtgggctattacgtctggatcctctagcgttaaagtagcagtcctggatacagggatcgaccataatcacccatccttggccaacttcgtgaatactaatcttggccggtcgtttgttggaggaaacaccatggatgttcaaggtcatggcacacatgttgctggcacgattgcatcttatgggagtgtaagcggagtgatgcagagtgcgacactgatcccggtcaaagtgctcgataattctggcagcgggtccctttacggtattacgcaaggcatattgtatgccgccgacatcgatgcggacgtcattaacatgtctctgggtggaggaggctataatcagagcatggatgaggctgttcaaacagcagttgctcagggaaccattgtagtagcagcgactggcaatgatggtgcatcgtcgatcagttatcctgctgcctacagcagcgtcattgcggtgggatctgtgacgaggaatcgtacacgatcctcgttttctaactatggatctgggcttgaagttatggcaccgggcagcaacatctacagtacgtatcctaattccagatatacatctttgagtggtacaagcatggctactccgcacgttgcgggcgtagctgggctcattcgcgcagccaacccagacatatctgtcgcgcaagcccgtcagattctgcgggataccgcgcaagaagcaggatcgttcacacagtacggctatggaatcgtcgatgctcatgccgccgttgttgctgcatccggtggtagcggcggc

SEQ ID NO: 2072 - protein, 413 aa, synthetic construct; identical to SEQ ID NO: 458
  REGION 1..413: note = Variant of serine peptidase from Bacillus sinesaloumensis

SEQ ID NO: 2073 - DNA, 1239 bp, synthetic construct
  misc_feature 1..1239: note = Variant of serine peptidase from Bacillus sinesaloumensis
  source 1..1239: mol_type = other DNA
atggcagatcaagctagtcaagctaatggaaaccaggacgtcattgaaggcgagctgatcgtttcagtggaaccgaagaacggtaaacctgatgtgagcattcaaagtgcacaatccgtaacagggcaggaagacgtccttaaatcgaaaggctttacgatcgttgataccttgcatgtagaggatagcagcgtcaagccactcgtctcgaagaatttcaataagaaagtggtggagaagatgggactggtgtatcttgttcaatactctccggaccagtttaaaagttccaacattgcgaagaaagaactcagaaaagaattgatggatctgggctttaaagtccgctatataagcgaaaattacaagatgatggcgatcgaaggtacagccactcttcaggcagtacaccctaaccaaaactggcattataatatgattaaagctccggaagcgtgggctattacgtctggatcctctagcgttaaagtagcagtcctggatacagggatcgaccataatcacccatccttggccaacttcgtgaatactaatcttggccggtcgtttgttggaggaaacaccatggatgttcaaggtcatggcacacatgttgctggcacgattgcatcttatgggagtgtaagcggagtgatgcagagtgcgacactgatcccggtcaaagtgctcgataattctggcagcgggtccctttacggtattacgcaaggcatattgtatgccgccgacatcgatgcggacgtcattaacatgtctctgggtggaggaggctataatcagagcatggatgaggctgttcaaacagcagttgctcagggaaccattgtagtagcagcgactggcaatgatggtgcatcgtcgatcagttatcctgctgcctacagcagcgtcattgcggtgggatctgtgacgtggaatcgtacacgatcctcgttttctaactatggatctgggcttgaagttatggcaccgggcagcaacatctacagtacgtatcctaattccagatatacatctttgagtggtacaagcatggctactccgcacgttgcgggcgtagctgggctcattcgcgcagccaacccagacatatctgtcgcgcaagcccgtcagattctgcgggataccgcgcaagaagcaggatcgttcacacagtacggctatggaatcgtcgatgctcatgccgccgttgttgctgcatccggtggtagcggcggc

SEQ ID NO: 2074 - protein, 413 aa, synthetic construct
  REGION 1..413: note = Variant of serine peptidase from Bacillus sinesaloumensis
MADQASQANGNQDVIEGELIVSVEPKNGKPDVSIQSAQSVTGQEDVLKSKGFTIVDTLHVEDSSVKPLVSKNFNKKVVEKMGLVYLVQYSPDQFKSSNIAKKELRKELMDLGFKVRYISENYKMMAIEGTATLQAVHPNQNWHYNMIKAPEAWAITSGSSSVKVAVLDTGIDHNHPSLANFVNTNLGRSFVGGNTMDVQGHGTHVAGTIASYGSVSGVMQSATLIPVKVLDNSGSGSLYGITQGILYAADIDADVINMSLGGGGYNQSMDEAVQTAVAQGTIVVAATGNDGASSISYPAAYSSVIAVGSVTWNRTRSSFSNYGSGLEVMAPGSNIYSTYPNSRYTSLSGTSMATPHVAGVAGLIRAANPDISVAQARQILRDTAQEAGSFTQYGYGIVDAHAAVVAASGGSGG

SEQ ID NO: 2075 - DNA, 1239 bp, synthetic construct
  misc_feature 1..1239: note = Variant of serine peptidase from Bacillus sinesaloumensis
  source 1..1239: mol_type = other DNA
atggcagatcaagctagtcaagctaatggaaaccaggacgtcattgaaggcgagctgatcgtttcagtggaaccgaagaacggtaaacctgatgtgagcattcaaagtgcacaatccgtaacagggcaggaagacgtccttaaatcgaaaggctttacgatcgttgataccttgcatgtagaggatagcagcgtcaagccactcgtctcgaagaatttcaataagaaagtggtggagaagatgggactggtgtatcttgttcaatactctccggaccagtttaaaagttccaacattgcgaagaaagaactcagaaaagaattgatggatctgggctttaaagtccgctatataagcgaaaattacaagatgatggcgatcgaaggtacagccactcttcaggcagtacaccctaaccaaaactggcattataatatgattaaagctccggaagcgtgggctattacgtctggatcctctagcgttaaagtagcagtcctggatacagggatcgaccataatcacccatccttggccaacttcgtgaatactaatcttggccggtcgtttgttggaggaaacaccatggatgttcaaggtcatggcacacatgttgctggcacgattgcatcttatgggagtgtaagcggagtgatgcagagtgcgacactgatcccggtcaaagtgctcgataattctggcagcgggtccctttacggtattacgcaaggcatattgtatgccgccgacatcgatgcggacgtcattaacatgtctctgggtggaggaggctataatcagagcatggatgaggctgttcaaacagcagttgctcagggaaccattgtagtagcagcgactggcaatgatggtgcatcgtcgatcagttatcctgctgcctacagcagcgtcattgcggtgggatctgtgacgatgaatcgtacacgatcctcgttttctaactatggatctgggcttgaagttatggcaccgggcagcaacatctacagtacgtatcctaattccagatatacatctttgagtggtacaagcatggctactccgcacgttgcgggcgtagctgggctcattcgcgcagccaacccagacatatctgtcgcgcaagcccgtcagattctgcgggataccgcgcaagaagcaggatcgttcacacagtacggctatggaatcgtcgatgctcatgccgccgttgttgctgcatccggtggtagcggcggc

SEQ ID NO: 2076 - protein, 413 aa, synthetic construct
  REGION 1..413: note = Variant of serine peptidase from Bacillus sinesaloumensis
MADQASQANGNQDVIEGELIVSVEPKNGKPDVSIQSAQSVTGQEDVLKSKGFTIVDTLHVEDSSVKPLVSKNFNKKVVEKMGLVYLVQYSPDQFKSSNIAKKELRKELMDLGFKVRYISENYKMMAIEGTATLQAVHPNQNWHYNMIKAPEAWAITSGSSSVKVAVLDTGIDHNHPSLANFVNTNLGRSFVGGNTMDVQGHGTHVAGTIASYGSVSGVMQSATLIPVKVLDNSGSGSLYGITQGILYAADIDADVINMSLGGGGYNQSMDEAVQTAVAQGTIVVAATGNDGASSISYPAAYSSVIAVGSVTMNRTRSSFSNYGSGLEVMAPGSNIYSTYPNSRYTSLSGTSMATPHVAGVAGLIRAANPDISVAQARQILRDTAQEAGSFTQYGYGIVDAHAAVVAASGGSGG

SEQ ID NO: 2077 - DNA, 1239 bp, synthetic construct
  misc_feature 1..1239: note = Variant of serine peptidase from Bacillus sinesaloumensis
  source 1..1239: mol_type = other DNA
atggcagatcaagctagtcaagctaatggaaaccaggacgtcattgaaggcgagctgatcgtttcagtggaaccgaagaacggtaaacctgatgtgagcattcaaagtgcacaatccgtaacagggcaggaagacgtccttaaatcgaaaggctttacgatcgttgataccttgcatgtagaggatagcagcgtcaagccactcgtctcgaagaatttcaataagaaagtggtggagaagatgggactggtgtatcttgttcaatactctccggaccagtttaaaagttccaacattgcgaagaaagaactcagaaaagaattgatggatctgggctttaaagtccgctatataagcgaaaattacaagatgatggcgatcgaaggtacagccactcttcaggcagtacaccctaaccaaaactggcattataatatgattaaagctccggaagcgtgggctattacgtctggatcctctagcgttaaagtagcagtcctggatacagggatcgaccataatcacccatccttggccaacttcgtgaatactaatcttggccggtcgtttgttggaggaaacaccatggatgttcaaggtcatggcacacatgttgctggcacgattgcatcttatgggagtgtaagcggagtgatgcagagtgcgacactgatcccggtcaaagtgctcgataattctggcagcgggtccctttacggtattacgcaaggcatattgtatgccgccgacatcgatgcggacgtcattaacatgtctctgggtggaggaggctataatcagagcatggatgaggctgttcaaacagcagttgctcagggaaccattgtagtagcagcgactggcaatgatggtgcatcgtcgatcagttatcctgctgcctacagcagcgtcattgcggtgggatctgtgacgctgaatcgtacacgatcctcgttttctaactatggatctgggcttgaagttatggcaccgggcagcaacatctacagtacgtatcctaattccagatatacatctttgagtggtacaagcatggctactccgcacgttgcgggcgtagctgggctcattcgcgcagccaacccagacatatctgtcgcgcaagcccgtcagattctgcgggataccgcgcaagaagcaggatcgttcacacagtacggctatggaatcgtcgatgctcatgccgccgttgttgctgcatccggtggtagcggcggc

SEQ ID NO: 2078 - protein, 413 aa, synthetic construct
  REGION 1..413: note = Variant of serine peptidase from Bacillus sinesaloumensis
MADQASQANGNQDVIEGELIVSVEPKNGKPDVSIQSAQSVTGQEDVLKSKGFTIVDTLHVEDSSVKPLVSKNFNKKVVEKMGLVYLVQYSPDQFKSSNIAKKELRKELMDLGFKVRYISENYKMMAIEGTATLQAVHPNQNWHYNMIKAPEAWAITSGSSSVKVAVLDTGIDHNHPSLANFVNTNLGRSFVGGNTMDVQGHGTHVAGTIASYGSVSGVMQSATLIPVKVLDNSGSGSLYGITQGILYAADIDADVINMSLGGGGYNQSMDEAVQTAVAQGTIVVAATGNDGASSISYPAAYSSVIAVGSVTLNRTRSSFSNYGSGLEVMAPGSNIYSTYPNSRYTSLSGTSMATPHVAGVAGLIRAANPDISVAQARQILRDTAQEAGSFTQYGYGIVDAHAAVVAASGGSGG

SEQ ID NO: 2079 - DNA, 1239 bp, synthetic construct
  misc_feature 1..1239: note = Variant of serine peptidase from Bacillus sinesaloumensis
  source 1..1239: mol_type = other DNA
atggcagatcaagctagtcaagctaatggaaaccaggacgtcattgaaggcgagctgatcgtttcagtggaaccgaagaacggtaaacctgatgtgagcattcaaagtgcacaatccgtaacagggcaggaagacgtccttaaatcgaaaggctttacgatcgttgataccttgcatgtagaggatagcagcgtcaagccactcgtctcgaagaatttcaataagaaagtggtggagaagatgggactggtgtatcttgttcaatactctccggaccagtttaaaagttccaacattgcgaagaaagaactcagaaaagaattgatggatctgggctttaaagtccgctatataagcgaaaattacaagatgatggcgatcgaaggtacagccactcttcaggcagtacaccctaaccaaaactggcattataatatgattaaagctccggaagcgtgggctattacgtctggatcctctagcgttaaagtagcagtcctggatacagggatcgaccataatcacccatccttggccaacttcgtgaatactaatcttggccggtcgtttgttggaggaaacaccatggatgttcaaggtcatggcacacatgttgctggcacgattgcatcttatgggagtgtaagcggagtgatgcagagtgcgacactgatcccggtcaaagtgctcgataattctggcagcgggtccctttacggtattacgcaaggcatattgtatgccgccgacatcgatgcggacgtcattaacatgtctctgggtggaggaggctataatcagagcatggatgaggctgttcaaacagcagttgctcagggaaccattgtagtagcagcgactggcaatgatggtgcatcgtcgatcagttatcctgctgcctacagcagcgtcattgcggtgggatctgtgacgaataatcgtacacgatcctcgttttctaactatggatctgggcttgaagttatggcaccgggcagcaacatctacagtacgtatcctaattccagatatacatctttgagtggtacaagcatggctactccgcacgttgcgggcgtagctgggctcattcgcgcagccaacccagacatatctgtcgcgcaagcccgtcagattctgcgggataccgcgcaagaagcaggatcgttcacacagtacggctatggaatcgtcgatgctcatgccgccgttgttgctgcatccggtggtagcggcggc

SEQ ID NO: 2080 - protein, 413 aa, synthetic construct
  REGION 1..413: note = Variant of serine peptidase from Bacillus sinesaloumensis
MADQASQANGNQDVIEGELIVSVEPKNGKPDVSIQSAQSVTGQEDVLKSKGFTIVDTLHVEDSSVKPLVSKNFNKKVVEKMGLVYLVQYSPDQFKSSNIAKKELRKELMDLGFKVRYISENYKMMAIEGTATLQAVHPNQNWHYNMIKAPEAWAITSGSSSVKVAVLDTGIDHNHPSLANFVNTNLGRSFVGGNTMDVQGHGTHVAGTIASYGSVSGVMQSATLIPVKVLDNSGSGSLYGITQGILYAADIDADVINMSLGGGGYNQSMDEAVQTAVAQGTIVVAATGNDGASSISYPAAYSSVIAVGSVTNNRTRSSFSNYGSGLEVMAPGSNIYSTYPNSRYTSLSGTSMATPHVAGVAGLIRAANPDISVAQARQILRDTAQEAGSFTQYGYGIVDAHAAVVAASGGSGG

SEQ ID NO: 2081 - DNA, 1239 bp, synthetic construct
  misc_feature 1..1239: note = Variant of serine peptidase from Bacillus sinesaloumensis
  source 1..1239: mol_type = other DNA
atggcagatcaagctagtcaagctaatggaaaccaggacgtcattgaaggcgagctgatcgtttcagtggaaccgaagaacggtaaacctgatgtgagcattcaaagtgcacaatccgtaacagggcaggaagacgtccttaaatcgaaaggctttacgatcgttgataccttgcatgtagaggatagcagcgtcaagccactcgtctcgaagaatttcaataagaaagtggtggagaagatgggactggtgtatcttgttcaatactctccggaccagtttaaaagttccaacattgcgaagaaagaactcagaaaagaattgatggatctgggctttaaagtccgctatataagcgaaaattacaagatgatggcgatcgaaggtacagccactcttcaggcagtacaccctaaccaaaactggcattataatatgattaaagctccggaagcgtgggctattacgtctggatcctctagcgttaaagtagcagtcctggatacagggatcgaccataatcacccatccttggccaacttcgtgaatactaatcttggccggtcgtttgttggaggaaacaccatggatgttcaaggtcatggcacacatgttgctggcacgattgcatcttatgggagtgtaagcggagtgatgcagagtgcgacactgatcccggtcaaagtgctcgataattctggcagcgggtccctttacggtattacgcaaggcatattgtatgccgccgacatcgatgcggacgtcattaacatgtctctgggtggaggaggctataatcagagcatggatgaggctgttcaaacagcagttgctcagggaaccattgtagtagcagcgactggcaatgatggtgcatcgtcgatcagttatcctgctgcctacagcagcgtcattgcggtgggatctgtgacggagaatcgtacacgatcctcgttttctaactatggatctgggcttgaagttatggcaccgggcagcaacatctacagtacgtatcctaattccagatatacatctttgagtggtacaagcatggctactccgcacgttgcgggcgtagctgggctcattcgcgcagccaacccagacatatctgtcgcgcaagcccgtcagattctgcgggataccgcgcaagaagcaggatcgttcacacagtacggctatggaatcgtcgatgctcatgccgccgttgttgctgcatccggtggtagcggcggc

SEQ ID NO: 2082 - protein, 413 aa, synthetic construct
  REGION 1..413: note = Variant of serine peptidase from Bacillus sinesaloumensis
MADQASQANGNQDVIEGELIVSVEPKNGKPDVSIQSAQSVTGQEDVLKSKGFTIVDTLHVEDSSVKPLVSKNFNKKVVEKMGLVYLVQYSPDQFKSSNIAKKELRKELMDLGFKVRYISENYKMMAIEGTATLQAVHPNQNWHYNMIKAPEAWAITSGSSSVKVAVLDTGIDHNHPSLANFVNTNLGRSFVGGNTMDVQGHGTHVAGTIASYGSVSGVMQSATLIPVKVLDNSGSGSLYGITQGILYAADIDADVINMSLGGGGYNQSMDEAVQTAVAQGTIVVAATGNDGASSISYPAAYSSVIAVGSVTENRTRSSFSNYGSGLEVMAPGSNIYSTYPNSRYTSLSGTSMATPHVAGVAGLIRAANPDISVAQARQILRDTAQEAGSFTQYGYGIVDAHAAVVAASGGSGG

SEQ ID NO: 2083 - DNA, 1239 bp, synthetic construct
  misc_feature 1..1239: note = Variant of serine peptidase from Bacillus sinesaloumensis
  source 1..1239: mol_type = other DNA
atggcagatcaagctagtcaagctaatggaaaccaggacgtcattgaaggcgagctgatcgtttcagtggaaccgaagaacggtaaacctgatgtgagcattcaaagtgcacaatccgtaacagggcaggaagacgtccttaaatcgaaaggctttacgatcgttgataccttgcatgtagaggatagcagcgtcaagccactcgtctcgaagaatttcaataagaaagtggtggagaagatgggactggtgtatcttgttcaatactctccggaccagtttaaaagttccaacattgcgaagaaagaactcagaaaagaattgatggatctgggctttaaagtccgctatataagcgaaaattacaagatgatggcgatcgaaggtacagccactcttcaggcagtacaccctaaccaaaactggcattataatatgattaaagctccggaagcgtgggctattacgtctggatcctctagcgttaaagtagcagtcctggatacagggatcgaccataatcacccatccttggccaacttcgtgaatactaatcttggccggtcgtttgttggaggaaacaccatggatgttcaaggtcatggcacacatgttgctggcacgattgcatcttatgggagtgtaagcggagtgatgcagagtgcgacactgatcccggtcaaagtgctcgataattctggcagcgggtccctttacggtattacgcaaggcatattgtatgccgccgacatcgatgcggacgtcattaacatgtctctgggtggaggaggctataatcagagcatggatgaggctgttcaaacagcagttgctcagggaaccattgtagtagcagcgactggcaatgatggtgcatcgtcgatcagttatcctgctgcctacagcagcgtcattgcggtgggatctgtgacggccaatcgtacacgatcctcgttttctaactatggatctgggcttgaagttatggcaccgggcagcaacatctacagtacgtatcctaattccagatatacatctttgagtggtacaagcatggctactccgcacgttgcgggcgtagctgggctcattcgcgcagccaacccagacatatctgtcgcgcaagcccgtcagattctgcgggataccgcgcaagaagcaggatcgttcacacagtacggctatggaatcgtcgatgctcatgccgccgttgttgctgcatccggtggtagcggcggc

SEQ ID NO: 2084 - protein, 413 aa, synthetic construct
  REGION 1..413: note = Variant of serine peptidase from Bacillus sinesaloumensis
MADQASQANGNQDVIEGELIVSVEPKNGKPDVSIQSAQSVTGQEDVLKSKGFTIVDTLHVEDSSVKPLVSKNFNKKVVEKMGLVYLVQYSPDQFKSSNIAKKELRKELMDLGFKVRYISENYKMMAIEGTATLQAVHPNQNWHYNMIKAPEAWAITSGSSSVKVAVLDTGIDHNHPSLANFVNTNLGRSFVGGNTMDVQGHGTHVAGTIASYGSVSGVMQSATLIPVKVLDNSGSGSLYGITQGILYAADIDADVINMSLGGGGYNQSMDEAVQTAVAQGTIVVAATGNDGASSISYPAAYSSVIAVGSVTANRTRSSFSNYGSGLEVMAPGSNIYSTYPNSRYTSLSGTSMATPHVAGVAGLIRAANPDISVAQARQILRDTAQEAGSFTQYGYGIVDAHAAVVAASGGSGG

SEQ ID NO: 2085 - DNA, 1239 bp, synthetic construct
  misc_feature 1..1239: note = Variant of serine peptidase from Bacillus sinesaloumensis
  source 1..1239: mol_type = other DNA
atggcagatcaagctagtcaagctaatggaaaccaggacgtcattgaaggcgagctgatcgtttcagtggaaccgaagaacggtaaacctgatgtgagcattcaaagtgcacaatccgtaacagggcaggaagacgtccttaaatcgaaaggctttacgatcgttgataccttgcatgtagaggatagcagcgtcaagccactcgtctcgaagaatttcaataagaaagtggtggagaagatgggactggtgtatcttgttcaatactctccggaccagtttaaaagttccaacattgcgaagaaagaactcagaaaagaattgatggatctgggctttaaagtccgctatataagcgaaaattacaagatgatggcgatcgaaggtacagccactcttcaggcagtacaccctaaccaaaactggcattataatatgattaaagctccggaagcgtgggctattacgtctggatcctctagcgttaaagtagcagtcctggatacagggatcgaccataatcacccatccttggccaacttcgtgaatactaatcttggccggtcgtttgttggaggaaacaccatggatgttcaaggtcatggcacacatgttgctggcacgattgcatcttatgggagtgtaagcggagtgatgcagagtgcgacactgatcccggtcaaagtgctcgataattctggcagcgggtccctttacggtattacgcaaggcatattgtatgccgccgacatcgatgcggacgtcattaacatgtctctgggtggaggaggctataatcagagcatggatgaggctgttcaaacagcagttgctcagggaaccattgtagtagcagcgactggcaatgatggtgcatcgtcgatcagttatcctgctgcctacagcagcgtcattgcggtgggatctgtgacgacgaatcgtacacgatcctcgttttctaactatggatctgggcttgaagttatggcaccgggcagcaacatctacagtacgtatcctaattccagatatacatctttgagtggtacaagcatggctactccgcacgttgcgggcgtagctgggctcattcgcgcagccaacccagacatatctgtcgcgcaagcccgtcagattctgcgggataccgcgcaagaagcaggatcgttcacacagtacggctatggaatcgtcgatgctcatgccgccgttgttgctgcatccggtggtagcggcggc

SEQ ID NO: 2086 - protein, 413 aa, synthetic construct
  REGION 1..413: note = Variant of serine peptidase from Bacillus sinesaloumensis
MADQASQANGNQDVIEGELIVSVEPKNGKPDVSIQSAQSVTGQEDVLKSKGFTIVDTLHVEDSSVKPLVSKNFNKKVVEKMGLVYLVQYSPDQFKSSNIAKKELRKELMDLGFKVRYISENYKMMAIEGTATLQAVHPNQNWHYNMIKAPEAWAITSGSSSVKVAVLDTGIDHNHPSLANFVNTNLGRSFVGGNTMDVQGHGTHVAGTIASYGSVSGVMQSATLIPVKVLDNSGSGSLYGITQGILYAADIDADVINMSLGGGGYNQSMDEAVQTAVAQGTIVVAATGNDGASSISYPAAYSSVIAVGSVTTNRTRSSFSNYGSGLEVMAPGSNIYSTYPNSRYTSLSGTSMATPHVAGVAGLIRAANPDISVAQARQILRDTAQEAGSFTQYGYGIVDAHAAVVAASGGSGG

SEQ ID NO: 2087 - DNA, 1239 bp, synthetic construct
  misc_feature 1..1239: note = Variant of serine peptidase from Bacillus sinesaloumensis
  source 1..1239: mol_type = other DNA
atggcagatcaagctagtcaagctaatggaaaccaggacgtcattgaaggcgagctgatcgtttcagtggaaccgaagaacggtaaacctgatgtgagcattcaaagtgcacaatccgtaacagggcaggaagacgtccttaaatcgaaaggctttacgatcgttgataccttgcatgtagaggatagcagcgtcaagccactcgtctcgaagaatttcaataagaaagtggtggagaagatgggactggtgtatcttgttcaatactctccggaccagtttaaaagttccaacattgcgaagaaagaactcagaaaagaattgatggatctgggctttaaagtccgctatataagcgaaaattacaagatgatggcgatcgaaggtacagccactcttcaggcagtacaccctaaccaaaactggcattataatatgattaaagctccggaagcgtgggctattacgtctggatcctctagcgttaaagtagcagtcctggatacagggatcgaccataatcacccatccttggccaacttcgtgaatactaatcttggccggtcgtttgttggaggaaacaccatggatgttcaaggtcatggcacacatgttgctggcacgattgcatcttatgggagtgtaagcggagtgatgcagagtgcgacactgatcccggtcaaagtgctcgataattctggcagcgggtccctttacggtattacgcaaggcatattgtatgccgccgacatcgatgcggacgtcattaacatgtctctgggtggaggaggctataatcagagcatggatgaggctgttcaaacagcagttgctcagggaaccattgtagtagcagcgactggcaatgatggtgcatcgtcgatcagttatcctgctgcctacagcagcgtcattgcggtgggatctgtgacgtacaatcgtacacgatcctcgttttctaactatggatctgggcttgaagttatggcaccgggcagcaacatctacagtacgtatcctaattccagatatacatctttgagtggtacaagcatggctactccgcacgttgcgggcgtagctgggctcattcgcgcagccaacccagacatatctgtcgcgcaagcccgtcagattctgcgggataccgcgcaagaagcaggatcgttcacacagtacggctatggaatcgtcgatgctcatgccgccgttgttgctgcatccggtggtagcggcggc

SEQ ID NO: 2088 - protein, 413 aa, synthetic construct
  REGION 1..413: note = Variant of serine peptidase from Bacillus sinesaloumensis
MADQASQANGNQDVIEGELIVSVEPKNGKPDVSIQSAQSVTGQEDVLKSKGFTIVDTLHVEDSSVKPLVSKNFNKKVVEKMGLVYLVQYSPDQFKSSNIAKKELRKELMDLGFKVRYISENYKMMAIEGTATLQAVHPNQNWHYNMIKAPEAWAITSGSSSVKVAVLDTGIDHNHPSLANFVNTNLGRSFVGGNTMDVQGHGTHVAGTIASYGSVSGVMQSATLIPVKVLDNSGSGSLYGITQGILYAADIDADVINMSLGGGGYNQSMDEAVQTAVAQGTIVVAATGNDGASSISYPAAYSSVIAVGSVTYNRTRSSFSNYGSGLEVMAPGSNIYSTYPNSRYTSLSGTSMATPHVAGVAGLIRAANPDISVAQARQILRDTAQEAGSFTQYGYGIVDAHAAVVAASGGSGG

SEQ ID NO: 2089 - DNA, 1239 bp, synthetic construct
  misc_feature 1..1239: note = Variant of serine peptidase from Bacillus sinesaloumensis
  source 1..1239: mol_type = other DNA
atggcagatcaagctagtcaagctaatggaaaccaggacgtcattgaaggcgagctgatcgtttcagtggaaccgaagaacggtaaacctgatgtgagcattcaaagtgcacaatccgtaacagggcaggaagacgtccttaaatcgaaaggctttacgatcgttgataccttgcatgtagaggatagcagcgtcaagccactcgtctcgaagaatttcaataagaaagtggtggagaagatgggactggtgtatcttgttcaatactctccggaccagtttaaaagttccaacattgcgaagaaagaactcagaaaagaattgatggatctgggctttaaagtccgctatataagcgaaaattacaagatgatggcgatcgaaggtacagccactcttcaggcagtacaccctaaccaaaactggcattataatatgattaaagctccggaagcgtgggctattacgtctggatcctctagcgttaaagtagcagtcctggatacagggatcgaccataatcacccatccttggccaacttcgtgaatactaatcttggccggtcgtttgttggaggaaacaccatggatgttcaaggtcatggcacacatgttgctggcacgattgcatcttatgggagtgtaagcggagtgatgcagagtgcgacactgatcccggtcaaagtgctcgataattctggcagcgggtccctttacggtattacgcaaggcatattgtatgccgccgacatcgatgcggacgtcattaacatgtctctgggtggaggaggctataatcagagcatggatgaggctgttcaaacagcagttgctcagggaaccattgtagtagcagcgactggcaatgatggtgcatcgtcgatcagttatcctgctgcctacagcagcgtcattgcggtgggatctgtgacgccgaatcgtacacgatcctcgttttctaactatggatctgggcttgaagttatggcaccgggcagcaacatctacagtacgtatcctaattccagatatacatctttgagtggtacaagcatggctactccgcacgttgcgggcgtagctgggctcattcgcgcagccaacccagacatatctgtcgcgcaagcccgtcagattctgcgggataccgcgcaagaagcaggatcgttcacacagtacggctatggaatcgtcgatgctcatgccgccgttgttgctgcatccggtggtagcggcggc

SEQ ID NO: 2090 - protein, 413 aa, synthetic construct
  REGION 1..413: note = Variant of serine peptidase from Bacillus sinesaloumensis
MADQASQANGNQDVIEGELIVSVEPKNGKPDVSIQSAQSVTGQEDVLKSKGFTIVDTLHVEDSSVKPLVSKNFNKKVVEKMGLVYLVQYSPDQFKSSNIAKKELRKELMDLGFKVRYISENYKMMAIEGTATLQAVHPNQNWHYNMIKAPEAWAITSGSSSVKVAVLDTGIDHNHPSLANFVNTNLGRSFVGGNTMDVQGHGTHVAGTIASYGSVSGVMQSATLIPVKVLDNSGSGSLYGITQGILYAADIDADVINMSLGGGGYNQSMDEAVQTAVAQGTIVVAATGNDGASSISYPAAYSSVIAVGSVTPNRTRSSFSNYGSGLEVMAPGSNIYSTYPNSRYTSLSGTSMATPHVAGVAGLIRAANPDISVAQARQILRDTAQEAGSFTQYGYGIVDAHAAVVAASGGSGG

SEQ ID NO: 2091 - DNA, 1239 bp, synthetic construct
  misc_feature 1..1239: note = Variant of serine peptidase from Bacillus sinesaloumensis
  source 1..1239: mol_type = other DNA
atggcagatcaagctagtcaagctaatggaaaccaggacgtcattgaaggcgagctgatcgtttcagtggaaccgaagaacggtaaacctgatgtgagcattcaaagtgcacaatccgtaacagggcaggaagacgtccttaaatcgaaaggctttacgatcgttgataccttgcatgtagaggatagcagcgtcaagccactcgtctcgaagaatttcaataagaaagtggtggagaagatgggactggtgtatcttgttcaatactctccggaccagtttaaaagttccaacattgcgaagaaagaactcagaaaagaattgatggatctgggctttaaagtccgctatataagcgaaaattacaagatgatggcgatcgaaggtacagccactcttcaggcagtacaccctaaccaaaactggcattataatatgattaaagctccggaagcgtgggctattacgtctggatcctctagcgttaaagtagcagtcctggatacagggatcgaccataatcacccatccttggccaacttcgtgaatactaatcttggccggtcgtttgttggaggaaacaccatggatgttcaaggtcatggcacacatgttgctggcacgattgcatcttatgggagtgtaagcggagtgatgcagagtgcgacactgatcccggtcaaagtgctcgataattctggcagcgggtccctttacggtattacgcaaggcatattgtatgccgccgacatcgatgcggacgtcattaacatgtctctgggtggaggaggctataatcagagcatggatgaggctgttcaaacagcagttgctcagggaaccattgtagtagcagcgactggcaatgatggtgcatcgtcgatcagttatcctgctgcctacagcagcgtcattgcggtgggatctgtgacgcacaatcgtacacgatcctcgttttctaactatggatctgggcttgaagttatggcaccgggcagcaacatctacagtacgtatcctaattccagatatacatctttgagtggtacaagcatggctactccgcacgttgcgggcgtagctgggctcattcgcgcagccaacccagacatatctgtcgcgcaagcccgtcagattctgcgggataccgcgcaagaagcaggatcgttcacacagtacggctatggaatcgtcgatgctcatgccgccgttgttgctgcatccggtggtagcggcggc

SEQ ID NO: 2092 - protein, 413 aa, synthetic construct
  REGION 1..413: note = Variant of serine peptidase from Bacillus sinesaloumensis
MADQASQANGNQDVIEGELIVSVEPKNGKPDVSIQSAQSVTGQEDVLKSKGFTIVDTLHVEDSSVKPLVSKNFNKKVVEKMGLVYLVQYSPDQFKSSNIAKKELRKELMDLGFKVRYISENYKMMAIEGTATLQAVHPNQNWHYNMIKAPEAWAITSGSSSVKVAVLDTGIDHNHPSLANFVNTNLGRSFVGGNTMDVQGHGTHVAGTIASYGSVSGVMQSATLIPVKVLDNSGSGSLYGITQGILYAADIDADVINMSLGGGGYNQSMDEAVQTAVAQGTIVVAATGNDGASSISYPAAYSSVIAVGSVTHNRTRSSFSNYGSGLEVMAPGSNIYSTYPNSRYTSLSGTSMATPHVAGVAGLIRAANPDISVAQARQILRDTAQEAGSFTQYGYGIVDAHAAVVAASGGSGG

SEQ ID NO: 2093 - DNA, 1239 bp, synthetic construct
  misc_feature 1..1239: note = Variant of serine peptidase from Bacillus sinesaloumensis
  source 1..1239: mol_type = other DNA
atggcagatcaagctagtcaagctaatggaaaccaggacgtcattgaaggcgagctgatcgtttcagtggaaccgaagaacggtaaacctgatgtgagcattcaaagtgcacaatccgtaacagggcaggaagacgtccttaaatcgaaaggctttacgatcgttgataccttgcatgtagaggatagcagcgtcaagccactcgtctcgaagaatttcaataagaaagtggtggagaagatgggactggtgtatcttgttcaatactctccggaccagtttaaaagttccaacattgcgaagaaagaactcagaaaagaattgatggatctgggctttaaagtccgctatataagcgaaaattacaagatgatggcgatcgaaggtacagccactcttcaggcagtacaccctaaccaaaactggcattataatatgattaaagctccggaagcgtgggctattacgtctggatcctctagcgttaaagtagcagtcctggatacagggatcgaccataatcacccatccttggccaacttcgtgaatactaatcttggccggtcgtttgttggaggaaacaccatggatgttcaaggtcatggcacacatgttgctggcacgattgcatcttatgggagtgtaagcggagtgatgcagagtgcgacactgatcccggtcaaagtgctcgataattctggcagcgggtccctttacggtattacgcaaggcatattgtatgccgccgacatcgatgcggacgtcattaacatgtctctgggtggaggaggctataatcagagcatggatgaggctgttcaaacagcagttgctcagggaaccattgtagtagcagcgactggcaatgatggtgcatcgtcgatcagttatcctgctgcctacagcagcgtcattgcggtgggatctgtgacgcagaatcgtacacgatcctcgttttctaactatggatctgggcttgaagttatggcaccgggcagcaacatctacagtacgtatcctaattccagatatacatctttgagtggtacaagcatggctactccgcacgttgcgggcgtagctgggctcattcgcgcagccaacccagacatatctgtcgcgcaagcccgtcagattctgcgggataccgcgcaagaagcaggatcgttcacacagtacggctatggaatcgtcgatgctcatgccgccgttgttgctgcatccggtggtagcggcggc

SEQ ID NO: 2094 - protein, 413 aa, synthetic construct
  REGION 1..413: note = Variant of serine peptidase from Bacillus sinesaloumensis
MADQASQANGNQDVIEGELIVSVEPKNGKPDVSIQSAQSVTGQEDVLKSKGFTIVDTLHVEDSSVKPLVSKNFNKKVVEKMGLVYLVQYSPDQFKSSNIAKKELRKELMDLGFKVRYISENYKMMAIEGTATLQAVHPNQNWHYNMIKAPEAWAITSGSSSVKVAVLDTGIDHNHPSLANFVNTNLGRSFVGGNTMDVQGHGTHVAGTIASYGSVSGVMQSATLIPVKVLDNSGSGSLYGITQGILYAADIDADVINMSLGGGGYNQSMDEAVQTAVAQGTIVVAATGNDGASSISYPAAYSSVIAVGSVTQNRTRSSFSNYGSGLEVMAPGSNIYSTYPNSRYTSLSGTSMATPHVAGVAGLIRAANPDISVAQARQILRDTAQEAGSFTQYGYGIVDAHAAVVAASGGSGG

SEQ ID NO: 2095 - DNA, 1239 bp, synthetic construct
  misc_feature 1..1239: note = Variant of serine peptidase from Bacillus sinesaloumensis
  source 1..1239: mol_type = other DNA
atggcagatcaagctagtcaagctaatggaaaccaggacgtcattgaaggcgagctgatcgtttcagtggaaccgaagaacggtaaacctgatgtgagcattcaaagtgcacaatccgtaacagggcaggaagacgtccttaaatcgaaaggctttacgatcgttgataccttgcatgtagaggatagcagcgtcaagccactcgtctcgaagaatttcaataagaaagtggtggagaagatgggactggtgtatcttgttcaatactctccggaccagtttaaaagttccaacattgcgaagaaagaactcagaaaagaattgatggatctgggctttaaagtccgctatataagcgaaaattacaagatgatggcgatcgaaggtacagccactcttcaggcagtacaccctaaccaaaactggcattataatatgattaaagctccggaagcgtgggctattacgtctggatcctctagcgttaaagtagcagtcctggatacagggatcgaccataatcacccatccttggccaacttcgtgaatactaatcttggccggtcgtttgttggaggaaacaccatggatgttcaaggtcatggcacacatgttgctggcacgattgcatcttatgggagtgtaagcggagtgatgcagagtgcgacactgatcccggtcaaagtgctcgataattctggcagcgggtccctttacggtattacgcaaggcatattgtatgccgccgacatcgatgcggacgtcattaacatgtctctgggtggaggaggctataatcagagcatggatgaggctgttcaaacagcagttgctcagggaaccattgtagtagcagcgactggcaatgatggtgcatcgtcgatcagttatcctgctgcctacagcagcgtcattgcggtgggatctgtgacgaagaatcgtacacgatcctcgttttctaactatggatctgggcttgaagttatggcaccgggcagcaacatctacagtacgtatcctaattccagatatacatctttgagtggtacaagcatggctactccgcacgttgcgggcgtagctgggctcattcgcgcagccaacccagacatatctgtcgcgcaagcccgtcagattctgcgggataccgcgcaagaagcaggatcgttcacacagtacggctatggaatcgtcgatgctcatgccgccgttgttgctgcatccggtggtagcggcggc

SEQ ID NO: 2096 - protein, 413 aa, synthetic construct
  REGION 1..413: note = Variant of serine peptidase from Bacillus sinesaloumensis
MADQASQANGNQDVIEGELIVSVEPKNGKPDVSIQSAQSVTGQEDVLKSKGFTIVDTLHVEDSSVKPLVSKNFNKKVVEKMGLVYLVQYSPDQFKSSNIAKKELRKELMDLGFKVRYISENYKMMAIEGTATLQAVHPNQNWHYNMIKAPEAWAITSGSSSVKVAVLDTGIDHNHPSLANFVNTNLGRSFVGGNTMDVQGHGTHVAGTIASYGSVSGVMQSATLIPVKVLDNSGSGSLYGITQGILYAADIDADVINMSLGGGGYNQSMDEAVQTAVAQGTIVVAATGNDGASSISYPAAYSSVIAVGSVTKNRTRSSFSNYGSGLEVMAPGSNIYSTYPNSRYTSLSGTSMATPHVAGVAGLIRAANPDISVAQARQILRDTAQEAGSFTQYGYGIVDAHAAVVAASGGSGG

SEQ ID NO: 2097 - DNA, 1239 bp, synthetic construct
  misc_feature 1..1239: note = Variant of serine peptidase from Bacillus sinesaloumensis
  source 1..1239: mol_type = other DNA
atggcagatcaagctagtcaagctaatggaaaccaggacgtcattgaaggcgagctgatcgtttcagtggaaccgaagaacggtaaacctgatgtgagcattcaaagtgcacaatccgtaacagggcaggaagacgtccttaaatcgaaaggctttacgatcgttgataccttgcatgtagaggatagcagcgtcaagccactcgtctcgaagaatttcaataagaaagtggtggagaagatgggactggtgtatcttgttcaatactctccggaccagtttaaaagttccaacattgcgaagaaagaactcagaaaagaattgatggatctgggctttaaagtccgctatataagcgaaaattacaagatgatggcgatcgaaggtacagccactcttcaggcagtacaccctaaccaaaactggcattataatatgattaaagctccggaagcgtgggctattacgtctggatcctctagcgttaaagtagcagtcctggatacagggatcgaccataatcacccatccttggccaacttcgtgaatactaatcttggccggtcgtttgttggaggaaacaccatggatgttcaaggtcatggcacacatgttgctggcacgattgcatcttatgggagtgtaagcggagtgatgcagagtgcgacactgatcccggtcaaagtgctcgataattctggcagcgggtccctttacggtattacgcaaggcatattgtatgccgccgacatcgatgcggacgtcattaacatgtctctgggtggaggaggctataatcagagcatggatgaggctgttcaaacagcagttgctcagggaaccattgtagtagcagcgactggcaatgatggtgcatcgtcgatcagttatcctgctgcctacagcagcgtcattgcggtgggatctgtgacgtgcaatcgtacacgatcctcgttttctaactatggatctgggcttgaagttatggcaccgggcagcaacatctacagtacgtatcctaattccagatatacatctttgagtggtacaagcatggctactccgcacgttgcgggcgtagctgggctcattcgcgcagccaacccagacatatctgtcgcgcaagcccgtcagattctgcgggataccgcgcaagaagcaggatcgttcacacagtacggctatggaatcgtcgatgctcatgccgccgttgttgctgcatccggtggtagcggcggc

SEQ ID NO: 2098 - protein, 413 aa, synthetic construct
  REGION 1..413: note = Variant of serine peptidase from Bacillus sinesaloumensis
MADQASQANGNQDVIEGELIVSVEPKNGKPDVSIQSAQSVTGQEDVLKSKGFTIVDTLHVEDSSVKPLVSKNFNKKVVEKMGLVYLVQYSPDQFKSSNIAKKELRKELMDLGFKVRYISENYKMMAIEGTATLQAVHPNQNWHYNMIKAPEAWAITSGSSSVKVAVLDTGIDHNHPSLANFVNTNLGRSFVGGNTMDVQGHGTHVAGTIASYGSVSGVMQSATLIPVKVLDNSGSGSLYGITQGILYAADIDADVINMSLGGGGYNQSMDEAVQTAVAQGTIVVAATGNDGASSISYPAAYSSVIAVGSVTCNRTRSSFSNYGSGLEVMAPGSNIYSTYPNSRYTSLSGTSMATPHVAGVAGLIRAANPDISVAQARQILRDTAQEAGSFTQYGYGIVDAHAAVVAASGGSGG

SEQ ID NO: 2099 - DNA, 1239 bp, synthetic construct; identical to SEQ ID NO: 529
  misc_feature 1..1239: note = Variant of serine peptidase from Bacillus sinesaloumensis
  source 1..1239: mol_type = other DNA

SEQ ID NO: 2100 - protein, 413 aa, synthetic construct; identical to SEQ ID NO: 530
  REGION 1..413: note = Variant of serine peptidase from Bacillus sinesaloumensis

SEQ ID NO: 2101 - DNA, 1239 bp, synthetic construct; identical to SEQ ID NO: 533
  misc_feature 1..1239: note = Variant of serine peptidase from Bacillus sinesaloumensis
  source 1..1239: mol_type = other DNA

SEQ ID NO: 2102 - protein, 413 aa, synthetic construct; identical to SEQ ID NO: 534
  REGION 1..413: note = Variant of serine peptidase from Bacillus sinesaloumensis

SEQ ID NO: 2103 - DNA, 1239 bp, synthetic construct
  misc_feature 1..1239: note = Variant of serine peptidase from Bacillus sinesaloumensis
  source 1..1239: mol_type = other DNA
atggcagatcaagctagtcaagctaatggaaaccaggacgtcattgaaggcgagctgatcgtttcagtggaaccgaagaacggtaaacctgatgtgagcattcaaagtgcacaatccgtaacagggcaggaagacgtccttaaatcgaaaggctttacgatcgttgataccttgcatgtagaggatagcagcgtcaagccactcgtctcgaagaatttcaataagaaagtggtggagaagatgggactggtgtatcttgttcaatactctccggaccagtttaaaagttccaacattgcgaagaaagaactcagaaaagaattgatggatctgggctttaaagtccgctatataagcgaaaattacaagatgatggcgatcgaaggtacagccactcttcaggcagtacaccctaaccaaaactggcattataatatgattaaagctccggaagcgtgggctattacgtctggatcctctagcgttaaagtagcagtcctggatacagggatcgaccataatcacccatccttggccaacttcgtgaatactaatcttggccggtcgtttgttggaggaaacaccatggatgttcaaggtcatggcacacatgttgctggcacgattgcatcttatgggagtgtaagcggagtgatgcagagtgcgacactgatcccggtcaaagtgctcgataattctggcagcgggtccctttacggtattacgcaaggcatattgtatgccgccgacatcgatgcggacgtcattaacatgtctctgggtggaggaggctataatcagagcatggatgaggctgttcaaacagcagttgctcagggaaccattgtagtagcagcgactggcaatgatggtgcatcgtcgatcagttatcctgctgcctacagcagcgtcattgcggtgggatctgtgacgtccaatcgtagtcgatcctcgttttctaactatggatctgggcttgaagttatggcaccgggcagcaacatctacagtacgtatcctaattccagatatacatctttgagtggtacaagcatggctactccgcacgttgcgggcgtagctgggctcattcgcgcagccaacccagacatatctgtcgcgcaagcccgtcagattctgcgggataccgcgcaagaagcaggatcgttcacacagtacggctatggaatcgtcgatgctcatgccgccgttgttgctgcatccggtggtagcggcggc

SEQ ID NO: 2104 - protein, 413 aa, synthetic construct
  REGION 1..413: note = Variant of serine peptidase from Bacillus sinesaloumensis
MADQASQANGNQDVIEGELIVSVEPKNGKPDVSIQSAQSVTGQEDVLKSKGFTIVDTLHVEDSSVKPLVSKNFNKKVVEKMGLVYLVQYSPDQFKSSNIAKKELRKELMDLGFKVRYISENYKMMAIEGTATLQAVHPNQNWHYNMIKAPEAWAITSGSSSVKVAVLDTGIDHNHPSLANFVNTNLGRSFVGGNTMDVQGHGTHVAGTIASYGSVSGVMQSATLIPVKVLDNSGSGSLYGITQGILYAADIDADVINMSLGGGGYNQSMDEAVQTAVAQGTIVVAATGNDGASSISYPAAYSSVIAVGSVTSNRSRSSFSNYGSGLEVMAPGSNIYSTYPNSRYTSLSGTSMATPHVAGVAGLIRAANPDISVAQARQILRDTAQEAGSFTQYGYGIVDAHAAVVAASGGSGG

SEQ ID NO: 2105 - DNA, 1239 bp, synthetic construct
  misc_feature 1..1239: note = Variant of serine peptidase from Bacillus sinesaloumensis
  source 1..1239: mol_type = other DNA
atggcagatcaagctagtcaagctaatggaaaccaggacgtcattgaaggcgagctgatcgtttcagtggaaccgaagaacggtaaacctgatgtgagcattcaaagtgcacaatccgtaacagggcaggaagacgtccttaaatcgaaaggctttacgatcgttgataccttgcatgtagaggatagcagcgtcaagccactcgtctcgaagaatttcaataagaaagtggtggagaagatgggactggtgtatcttgttcaatactctccggaccagtttaaaagttccaacattgcgaagaaagaactcagaaaagaattgatggatctgggctttaaagtccgctatataagcgaaaattacaagatgatggcgatcgaaggtacagccactcttcaggcagtacaccctaaccaaaactggcattataatatgattaaagctccggaagcgtgggctattacgtctggatcctctagcgttaaagtagcagtcctggatacagggatcgaccataatcacccatccttggccaacttcgtgaatactaatcttggccggtcgtttgttggaggaaacaccatggatgttcaaggtcatggcacacatgttgctggcacgattgcatcttatgggagtgtaagcggagtgatgcagagtgcgacactgatcccggtcaaagtgctcgataattctggcagcgggtccctttacggtattacgcaaggcatattgtatgccgccgacatcgatgcggacgtcattaacatgtctctgggtggaggaggctataatcagagcatggatgaggctgttcaaacagcagttgctcagggaaccattgtagtagcagcgactggcaatgatggtgcatcgtcgatcagttatcctgctgcctacagcagcgtcattgcggtgggatctgtgacgtccaatcgtctgcgatcctcgttttctaactatggatctgggcttgaagttatggcaccgggcagcaacatctacagtacgtatcctaattccagatatacatctttgagtggtacaagcatggctactccgcacgttgcgggcgtagctgggctcattcgcgcagccaacccagacatatctgtcgcgcaagcccgtcagattctgcgggataccgcgcaagaagcaggatcgttcacacagtacggctatggaatcgtcgatgctcatgccgccgttgttgctgcatccggtggtagcggcggc

SEQ ID NO: 2106 - protein, 413 aa, synthetic construct; identical to SEQ ID NO: 252
  REGION 1..413: note = Variant of serine peptidase from Bacillus sinesaloumensis

SEQ ID NO: 2107 - DNA, 1239 bp, synthetic construct; identical to SEQ ID NO: 139
  misc_feature 1..1239: note = Variant of serine peptidase from Bacillus sinesaloumensis
  source 1..1239: mol_type = other DNA

SEQ ID NO: 2108 - protein, 413 aa, synthetic construct; identical to SEQ ID NO: 140
  REGION 1..413: note = Variant of serine peptidase from Bacillus sinesaloumensis

SEQ ID NO: 2109 - DNA, 1239 bp, synthetic construct
  misc_feature 1..1239: note = Variant of serine peptidase from Bacillus sinesaloumensis
  source 1..1239: mol_type = other DNA
atggcagatcaagctagtcaagctaatggaaaccaggacgtcattgaaggcgagctgatcgtttcagtggaaccgaagaacggtaaacctgatgtgagcattcaaagtgcacaatccgtaacagggcaggaagacgtccttaaatcgaaaggctttacgatcgttgataccttgcatgtagaggatagcagcgtcaagccactcgtctcgaagaatttcaataagaaagtggtggagaagatgggactggtgtatcttgttcaatactctccggaccagtttaaaagttccaacattgcgaagaaagaactcagaaaagaattgatggatctgggctttaaagtccgctatataagcgaaaattacaagatgatggcgatcgaaggtacagccactcttcaggcagtacaccctaaccaaaactggcattataatatgattaaagctccggaagcgtgggctattacgtctggatcctctagcgttaaagtagcagtcctggatacagggatcgaccataatcacccatccttggccaacttcgtgaatactaatcttggccggtcgtttgttggaggaaacaccatggatgttcaaggtcatggcacacatgttgctggcacgattgcatcttatgggagtgtaagcggagtgatgcagagtgcgacactgatcccggtcaaagtgctcgataattctggcagcgggtccctttacggtattacgcaaggcatattgtatgccgccgacatcgatgcggacgtcattaacatgtctctgggtggaggaggctataatcagagcatggatgaggctgttcaaacagcagttgctcagggaaccattgtagtagcagcgactggcaatgatggtgcatcgtcgatcagttatcctgctgcctacagcagcgtcattgcggtgggatctgtgacgtccaatcgtgggcgatcctcgttttctaactatggatctgggcttgaagttatggcaccgggcagcaacatctacagtacgtatcctaattccagatatacatctttgagtggtacaagcatggctactccgcacgttgcgggcgtagctgggctcattcgcgcagccaacccagacatatctgtcgcgcaagcccgtcagattctgcgggataccgcgcaagaagcaggatcgttcacacagtacggctatggaatcgtcgatgctcatgccgccgttgttgctgcatccggtggtagcggcggc

SEQ ID NO: 2110 - protein, 413 aa, synthetic construct
  REGION 1..413: note = Variant of serine peptidase from Bacillus sinesaloumensis
MADQASQANGNQDVIEGELIVSVEPKNGKPDVSIQSAQSVTGQEDVLKSKGFTIVDTLHVEDSSVKPLVSKNFNKKVVEKMGLVYLVQYSPDQFKSSNIAKKELRKELMDLGFKVRYISENYKMMAIEGTATLQAVHPNQNWHYNMIKAPEAWAITSGSSSVKVAVLDTGIDHNHPSLANFVNTNLGRSFVGGNTMDVQGHGTHVAGTIASYGSVSGVMQSATLIPVKVLDNSGSGSLYGITQGILYAADIDADVINMSLGGGGYNQSMDEAVQTAVAQGTIVVAATGNDGASSISYPAAYSSVIAVGSVTSNRGRSSFSNYGSGLEVMAPGSNIYSTYPNSRYTSLSGTSMATPHVAGVAGLIRAANPDISVAQARQILRDTAQEAGSFTQYGYGIVDAHAAVVAASGGSGG

SEQ ID NO: 2111 - DNA, 1239 bp, synthetic construct
  misc_feature 1..1239: note = Variant of serine peptidase from Bacillus sinesaloumensis
  source 1..1239: mol_type = other DNA
atggcagatcaagctagtcaagctaatggaaaccaggacgtcattgaaggcgagctgatcgtttcagtggaaccgaagaacggtaaacctgatgtgagcattcaaagtgcacaatccgtaacagggcaggaagacgtccttaaatcgaaaggctttacgatcgttgataccttgcatgtagaggatagcagcgtcaagccactcgtctcgaagaatttcaataagaaagtggtggagaagatgggactggtgtatcttgttcaatactctccggaccagtttaaaagttccaacattgcgaagaaagaactcagaaaagaattgatggatctgggctttaaagtccgctatataagcgaaaattacaagatgatggcgatcgaaggtacagccactcttcaggcagtacaccctaaccaaaactggcattataatatgattaaagctccggaagcgtgggctattacgtctggatcctctagcgttaaagtagcagtcctggatacagggatcgaccataatcacccatccttggccaacttcgtgaatactaatcttggccggtcgtttgttggaggaaacaccatggatgttcaaggtcatggcacacatgttgctggcacgattgcatcttatgggagtgtaagcggagtgatgcagagtgcgacactgatcccggtcaaagtgctcgataattctggcagcgggtccctttacggtattacgcaaggcatattgtatgccgccgacatcgatgcggacgtcattaacatgtctctgggtggaggaggctataatcagagcatggatgaggctgttcaaacagcagttgctcagggaaccattgtagtagcagcgactggcaatgatggtgcatcgtcgatcagttatcctgctgcctacagcagcgtcattgcggtgggatctgtgacgtccaatcgtgcgcgatcctcgttttctaactatggatctgggcttgaagttatggcaccgggcagcaacatctacagtacgtatcctaattccagatatacatctttgagtggtacaagcatggctactccgcacgttgcgggcgtagctgggctcattcgcgcagccaacccagacatatctgtcgcgcaagcccgtcagattctgcgggataccgcgcaagaagcaggatcgttcacacagtacggctatggaatcgtcgatgctcatgccgccgttgttgctgcatccggtggtagcggcggc

SEQ ID NO: 2112 - protein, 413 aa, synthetic construct
  REGION 1..413: note = Variant of serine peptidase from Bacillus sinesaloumensis
MADQASQANGNQDVIEGELIVSVEPKNGKPDVSIQSAQSVTGQEDVLKSKGFTIVDTLHVEDSSVKPLVSKNFNKKVVEKMGLVYLVQYSPDQFKSSNIAKKELRKELMDLGFKVRYISENYKMMAIEGTATLQAVHPNQNWHYNMIKAPEAWAITSGSSSVKVAVLDTGIDHNHPSLANFVNTNLGRSFVGGNTMDVQGHGTHVAGTIASYGSVSGVMQSATLIPVKVLDNSGSGSLYGITQGILYAADIDADVINMSLGGGGYNQSMDEAVQTAVAQGTIVVAATGNDGASSISYPAAYSSVIAVGSVTSNRARSSFSNYGSGLEVMAPGSNIYSTYPNSRYTSLSGTSMATPHVAGVAGLIRAANPDISVAQARQILRDTAQEAGSFTQYGYGIVDAHAAVVAASGGSGG

SEQ ID NO: 2113 - DNA, 1239 bp, synthetic construct; identical to SEQ ID NO: 99
  misc_feature 1..1239: note = Variant of serine peptidase from Bacillus sinesaloumensis
  source 1..1239: mol_type = other DNA

SEQ ID NO: 2114 - protein, 413 aa, synthetic construct; identical to SEQ ID NO: 100
  REGION 1..413: note = Variant of serine peptidase from Bacillus sinesaloumensis

SEQ ID NO: 2115 - DNA, 1239 bp, synthetic construct
  misc_feature 1..1239: note = Variant of serine peptidase from Bacillus sinesaloumensis
  source 1..1239: mol_type = other DNA
atggcagatcaagctagtcaagctaatggaaaccaggacgtcattgaaggcgagctgatcgtttcagtggaaccgaagaacggtaaacctgatgtgagcattcaaagtgcacaatccgtaacagggcaggaagacgtccttaaatcgaaaggctttacgatcgttgataccttgcatgtagaggatagcagcgtcaagccactcgtctcgaagaatttcaataagaaagtggtggagaagatgggactggtgtatcttgttcaatactctccggaccagtttaaaagttccaacattgcgaagaaagaactcagaaaagaattgatggatctgggctttaaagtccgctatataagcgaaaattacaagatgatggcgatcgaaggtacagccactcttcaggcagtacaccctaaccaaaactggcattataatatgattaaagctccggaagcgtgggctattacgtctggatcctctagcgttaaagtagcagtcctggatacagggatcgaccataatcacccatccttggccaacttcgtgaatactaatcttggccggtcgtttgttggaggaaacaccatggatgttcaaggtcatggcacacatgttgctggcacgattgcatcttatgggagtgtaagcggagtgatgcagagtgcgacactgatcccggtcaaagtgctcgataattctggcagcgggtccctttacggtattacgcaaggcatattgtatgccgccgacatcgatgcggacgtcattaacatgtctctgggtggaggaggctataatcagagcatggatgaggctgttcaaacagcagttgctcagggaaccattgtagtagcagcgactggcaatgatggtgcatcgtcgatcagttatcctgctgcctacagcagcgtcattgcggtgggatctgtgacgtccaatcgttatcgatcctcgttttctaactatggatctgggcttgaagttatggcaccgggcagcaacatctacagtacgtatcctaattccagatatacatctttgagtggtacaagcatggctactccgcacgttgcgggcgtagctgggctcattcgcgcagccaacccagacatatctgtcgcgcaagcccgtcagattctgcgggataccgcgcaagaagcaggatcgttcacacagtacggctatggaatcgtcgatgctcatgccgccgttgttgctgcatccggtggtagcggcggc

SEQ ID NO: 2116 - protein, 413 aa, synthetic construct
  REGION 1..413: note = Variant of serine peptidase from Bacillus sinesaloumensis
MADQASQANGNQDVIEGELIVSVEPKNGKPDVSIQSAQSVTGQEDVLKSKGFTIVDTLHVEDSSVKPLVSKNFNKKVVEKMGLVYLVQYSPDQFKSSNIAKKELRKELMDLGFKVRYISENYKMMAIEGTATLQAVHPNQNWHYNMIKAPEAWAITSGSSSVKVAVLDTGIDHNHPSLANFVNTNLGRSFVGGNTMDVQGHGTHVAGTIASYGSVSGVMQSATLIPVKVLDNSGSGSLYGITQGILYAADIDADVINMSLGGGGYNQSMDEAVQTAVAQGTIVVAATGNDGASSISYPAAYSSVIAVGSVTSNRYRSSFSNYGSGLEVMAPGSNIYSTYPNSRYTSLSGTSMATPHVAGVAGLIRAANPDISVAQARQILRDTAQEAGSFTQYGYGIVDAHAAVVAASGGSGG

SEQ ID NO: 2117 - DNA, 1239 bp, synthetic construct
  misc_feature 1..1239: note = Variant of serine peptidase from Bacillus sinesaloumensis
  source 1..1239: mol_type = other DNA
atggcagatcaagctagtcaagctaatggaaaccaggacgtcattgaaggcgagctgatcgtttcagtggaaccgaagaacggtaaacctgatgtgagcattcaaagtgcacaatccgtaacagggcaggaagacgtccttaaatcgaaaggctttacgatcgttgataccttgcatgtagaggatagcagcgtcaagccactcgtctcgaagaatttcaataagaaagtggtggagaagatgggactggtgtatcttgttcaatactctccggaccagtttaaaagttccaacattgcgaagaaagaactcagaaaagaattgatggatctgggctttaaagtccgctatataagcgaaaattacaagatgatggcgatcgaaggtacagccactcttcaggcagtacaccctaaccaaaactggcattataatatgattaaagctccggaagcgtgggctattacgtctggatcctctagcgttaaagtagcagtcctggatacagggatcgaccataatcacccatccttggccaacttcgtgaatactaatcttggccggtcgtttgttggaggaaacaccatggatgttcaaggtcatggcacacatgttgctggcacgattgcatcttatgggagtgtaagcggagtgatgcagagtgcgacactgatcccggtcaaagtgctcgataattctggcagcgggtccctttacggtattacgcaaggcatattgtatgccgccgacatcgatgcggacgtcattaacatgtctctgggtggaggaggctataatcagagcatggatgaggctgttcaaacagcagttgctcagggaaccattgtagtagcagcgactggcaatgatggtgcatcgtcgatcagttatcctgctgcctacagcagcgtcattgcggtgggatctgtgacgtccaatcgtaagcgatcctcgttttctaactatggatctgggcttgaagttatggcaccgggcagcaacatctacagtacgtatcctaattccagatatacatctttgagtggtacaagcatggctactccgcacgttgcgggcgtagctgggctcattcgcgcagccaacccagacatatctgtcgcgcaagcccgtcagattctgcgggataccgcgcaagaagcaggatcgttcacacagtacggctatggaatcgtcgatgctcatgccgccgttgttgctgcatccggtggtagcggcggc

SEQ ID NO: 2118 - protein, 413 aa, synthetic construct
  REGION 1..413: note = Variant of serine peptidase from Bacillus sinesaloumensis
MADQASQANGNQDVIEGELIVSVEPKNGKPDVSIQSAQSVTGQEDVLKSKGFTIVDTLHVEDSSVKPLVSKNFNKKVVEKMGLVYLVQYSPDQFKSSNIAKKELRKELMDLGFKVRYISENYKMMAIEGTATLQAVHPNQNWHYNMIKAPEAWAITSGSSSVKVAVLDTGIDHNHPSLANFVNTNLGRSFVGGNTMDVQGHGTHVAGTIASYGSVSGVMQSATLIPVKVLDNSGSGSLYGITQGILYAADIDADVINMSLGGGGYNQSMDEAVQTAVAQGTIVVAATGNDGASSISYPAAYSSVIAVGSVTSNRKRSSFSNYGSGLEVMAPGSNIYSTYPNSRYTSLSGTSMATPHVAGVAGLIRAANPDISVAQARQILRDTAQEAGSFTQYGYGIVDAHAAVVAASGGSGG

SEQ ID NO: 2119 - DNA, 1239 bp, synthetic construct; identical to SEQ ID NO: 195
  misc_feature 1..1239: note = Variant of serine peptidase from Bacillus sinesaloumensis
  source 1..1239: mol_type = other DNA

SEQ ID NO: 2120 - protein, 413 aa, synthetic construct; identical to SEQ ID NO: 196
  REGION 1..413: note = Variant of serine peptidase from Bacillus sinesaloumensis

SEQ ID NO: 2121 - DNA, 1239 bp, synthetic construct
  misc_feature 1..1239: note = Variant of serine peptidase from Bacillus sinesaloumensis
  source 1..1239: mol_type = other DNA
atggcagatcaagctagtcaagctaatggaaaccaggacgtcattgaaggcgagctgatcgtttcagtggaaccgaagaacggtaaacctgatgtgagcattcaaagtgcacaatccgtaacagggcaggaagacgtccttaaatcgaaaggctttacgatcgttgataccttgcatgtagaggatagcagcgtcaagccactcgtctcgaagaatttcaataagaaagtggtggagaagatgggactggtgtatcttgttcaatactctccggaccagtttaaaagttccaacattgcgaagaaagaactcagaaaagaattgatggatctgggctttaaagtccgctatataagcgaaaattacaagatgatggcgatcgaaggtacagccactcttcaggcagtacaccctaaccaaaactggcattataatatgattaaagctccggaagcgtgggctattacgtctggatcctctagcgttaaagtagcagtcctggatacagggatcgaccataatcacccatccttggccaacttcgtgaatactaatcttggccggtcgtttgttggaggaaacaccatggatgttcaaggtcatggcacacatgttgctggcacgattgcatcttatgggagtgtaagcggagtgatgcagagtgcgacactgatcccggtcaaagtgctcgataattctggcagcgggtccctttacggtattacgcaaggcatattgtatgccgccgacatcgatgcggacgtcattaacatgtctctgggtggaggaggctataatcagagcatggatgaggctgttcaaacagcagttgctcagggaaccattgtagtagcagcgactggcaatgatggtgcatcgtcgatcagttatcctgctgcctacagcagcgtcattgcggtgggatctgtgacgtccaatcgtgatcgatcctcgttttctaactatggatctgggcttgaagttatggcaccgggcagcaacatctacagtacgtatcctaattccagatatacatctttgagtggtacaagcatggctactccgcacgttgcgggcgtagctgggctcattcgcgcagccaacccagacatatctgtcgcgcaagcccgtcagattctgcgggataccgcgcaagaagcaggatcgttcacacagtacggctatggaatcgtcgatgctcatgccgccgttgttgctgcatccggtggtagcggcggc

SEQ ID NO: 2122 - protein, 413 aa, synthetic construct
  REGION 1..413: note = Variant of serine peptidase from Bacillus sinesaloumensis
MADQASQANGNQDVIEGELIVSVEPKNGKPDVSIQSAQSVTGQEDVLKSKGFTIVDTLHVEDSSVKPLVSKNFNKKVVEKMGLVYLVQYSPDQFKSSNIAKKELRKELMDLGFKVRYISENYKMMAIEGTATLQAVHPNQNWHYNMIKAPEAWAITSGSSSVKVAVLDTGIDHNHPSLANFVNTNLGRSFVGGNTMDVQGHGTHVAGTIASYGSVSGVMQSATLIPVKVLDNSGSGSLYGITQGILYAADIDADVINMSLGGGGYNQSMDEAVQTAVAQGTIVVAATGNDGASSISYPAAYSSVIAVGSVTSNRDRSSFSNYGSGLEVMAPGSNIYSTYPNSRYTSLSGTSMATPHVAGVAGLIRAANPDISVAQARQILRDTAQEAGSFTQYGYGIVDAHAAVVAASGGSGG

SEQ ID NO: 2123 - DNA, 1239 bp, synthetic construct
  misc_feature 1..1239: note = Variant of serine peptidase from Bacillus sinesaloumensis
  source 1..1239: mol_type = other DNA
atggcagatcaagctagtcaagctaatggaaaccaggacgtcattgaaggcgagctgatcgtttcagtggaaccgaagaacggtaaacctgatgtgagcattcaaagtgcacaatccgtaacagggcaggaagacgtccttaaatcgaaaggctttacgatcgttgataccttgcatgtagaggatagcagcgtcaagccactcgtctcgaagaatttcaataagaaagtggtggagaagatgggactggtgtatcttgttcaatactctccggaccagtttaaaagttccaacattgcgaagaaagaactcagaaaagaattgatggatctgggctttaaagtccgctatataagcgaaaattacaagatgatggcgatcgaaggtacagccactcttcaggcagtacaccctaaccaaaactggcattataatatgattaaagctccggaagcgtgggctattacgtctggatcctctagcgttaaagtagcagtcctggatacagggatcgaccataatcacccatccttggccaacttcgtgaatactaatcttggccggtcgtttgttggaggaaacaccatggatgttcaaggtcatggcacacatgttgctggcacgattgcatcttatgggagtgtaagcggagtgatgcagagtgcgacactgatcccggtcaaagtgctcgataattctggcagcgggtccctttacggtattacgcaaggcatattgtatgccgccgacatcgatgcggacgtcattaacatgtctctgggtggaggaggctataatcagagcatggatgaggctgttcaaacagcagttgctcagggaaccattgtagtagcagcgactggcaatgatggtgcatcgtcgatcagttatcctgctgcctacagcagcgtcattgcggtgggatctgtgacgtccaatcgttggcgatcctcgttttctaactatggatctgggcttgaagttatggcaccgggcagcaacatctacagtacgtatcctaattccagatatacatctttgagtggtacaagcatggctactccgcacgttgcgggcgtagctgggctcattcgcgcagccaacccagacatatctgtcgcgcaagcccgtcagattctgcgggataccgcgcaagaagcaggatcgttcacacagtacggctatggaatcgtcgatgctcatgccgccgttgttgctgcatccggtggtagcggcggc

SEQ ID NO: 2124 - protein, 413 aa, synthetic construct
  REGION 1..413: note = Variant of serine peptidase from Bacillus sinesaloumensis
MADQASQANGNQDVIEGELIVSVEPKNGKPDVSIQSAQSVTGQEDVLKSKGFTIVDTLHVEDSSVKPLVSKNFNKKVVEKMGLVYLVQYSPDQFKSSNIAKKELRKELMDLGFKVRYISENYKMMAIEGTATLQAVHPNQNWHYNMIKAPEAWAITSGSSSVKVAVLDTGIDHNHPSLANFVNTNLGRSFVGGNTMDVQGHGTHVAGTIASYGSVSGVMQSATLIPVKVLDNSGSGSLYGITQGILYAADIDADVINMSLGGGGYNQSMDEAVQTAVAQGTIVVAATGNDGASSISYPAAYSSVIAVGSVTSNRWRSSFSNYGSGLEVMAPGSNIYSTYPNSRYTSLSGTSMATPHVAGVAGLIRAANPDISVAQARQILRDTAQEAGSFTQYGYGIVDAHAAVVAASGGSGG

SEQ ID NO: 2125 - DNA, 1239 bp, synthetic construct
  misc_feature 1..1239: note = Variant of serine peptidase from Bacillus sinesaloumensis
  source 1..1239: mol_type = other DNA
atggcagatcaagctagtcaagctaatggaaaccaggacgtcattgaaggcgagctgatcgtttcagtggaaccgaagaacggtaaacctgatgtgagcattcaaagtgcacaatccgtaacagggcaggaagacgtccttaaatcgaaaggctttacgatcgttgataccttgcatgtagaggatagcagcgtcaagccactcgtctcgaagaatttcaataagaaagtggtggagaagatgggactggtgtatcttgttcaatactctccggaccagtttaaaagttccaacattgcgaagaaagaactcagaaaagaattgatggatctgggctttaaagtccgctatataagcgaaaattacaagatgatggcgatcgaaggtacagccactcttcaggcagtacaccctaaccaaaactggcattataatatgattaaagctccggaagcgtgggctattacgtctggatcctctagcgttaaagtagcagtcctggatacagggatcgaccataatcacccatccttggccaacttcgtgaatactaatcttggccggtcgtttgttggaggaaacaccatggatgttcaaggtcatggcacacatgttgctggcacgattgcatcttatgggagtgtaagcggagtgatgcagagtgcgacactgatcccggtcaaagtgctcgataattctggcagcgggtccctttacggtattacgcaaggcatattgtatgccgccgacatcgatgcggacgtcattaacatgtctctgggtggaggaggctataatcagagcatggatgaggctgttcaaacagcagttgctcagggaaccattgtagtagcagcgactggcaatgatggtgcatcgtcgatcagttatcctgctgcctacagcagcgtcattgcggtgggatctgtgacgtccaatcgttgtcgatcctcgttttctaactatggatctgggcttgaagttatggcaccgggcagcaacatctacagtacgtatcctaattccagatatacatctttgagtggtacaagcatggctactccgcacgttgcgggcgtagctgggctcattcgcgcagccaacccagacatatctgtcgcgcaagcccgtcagattctgcgggataccgcgcaagaagcaggatcgttcacacagtacggctatggaatcgtcgatgctcatgccgccgttgttgctgcatccggtggtagcggcggc

SEQ ID NO: 2126 - protein, 413 aa, synthetic construct
  REGION 1..413: note = Variant of serine peptidase from Bacillus sinesaloumensis
MADQASQANGNQDVIEGELIVSVEPKNGKPDVSIQSAQSVTGQEDVLKSKGFTIVDTLHVEDSSVKPLVSKNFNKKVVEKMGLVYLVQYSPDQFKSSNIAKKELRKELMDLGFKVRYISENYKMMAIEGTATLQAVHPNQNWHYNMIKAPEAWAITSGSSSVKVAVLDTGIDHNHPSLANFVNTNLGRSFVGGNTMDVQGHGTHVAGTIASYGSVSGVMQSATLIPVKVLDNSGSGSLYGITQGILYAADIDADVINMSLGGGGYNQSMDEAVQTAVAQGTIVVAATGNDGASSISYPAAYSSVIAVGSVTSNRCRSSFSNYGSGLEVMAPGSNIYSTYPNSRYTSLSGTSMATPHVAGVAGLIRAANPDISVAQARQILRDTAQEAGSFTQYGYGIVDAHAAVVAASGGSGG

SEQ ID NO: 2127 - DNA, 1239 bp, synthetic construct; identical to SEQ ID NO: 461
  misc_feature 1..1239: note = Variant of serine peptidase from Bacillus sinesaloumensis
  source 1..1239: mol_type = other DNA

SEQ ID NO: 2128 - protein, 413 aa, synthetic construct; identical to SEQ ID NO: 462
  REGION 1..413: note = Variant of serine peptidase from Bacillus sinesaloumensis

SEQ ID NO: 2129 - DNA, 1239 bp, synthetic construct; identical to SEQ ID NO: 249
  misc_feature 1..1239: note = Variant of serine peptidase from Bacillus sinesaloumensis
  source 1..1239: mol_type = other DNA

SEQ ID NO: 2130 - protein, 413 aa, synthetic construct; identical to SEQ ID NO: 250
  REGION 1..413: note = Variant of serine peptidase from Bacillus sinesaloumensis

SEQ ID NO: 2131 - DNA, 1239 bp, synthetic construct; identical to SEQ ID NO: 159
  misc_feature 1..1239: note = Variant of serine peptidase from Bacillus sinesaloumensis
  source 1..1239: mol_type = other DNA

SEQ ID NO: 2132 - protein, 413 aa, synthetic construct; identical to SEQ ID NO: 160
  REGION 1..413: note = Variant of serine peptidase from Bacillus sinesaloumensis

SEQ ID NO: 2133 - DNA, 1239 bp, synthetic construct
  misc_feature 1..1239: note = Variant of serine peptidase from Bacillus sinesaloumensis
  source 1..1239: mol_type = other DNA
atggcagatcaagctagtcaagctaatggaaaccaggacgtcattgaaggcgagctgatcgtttcagtggaaccgaagaacggtaaacctgatgtgagcattcaaagtgcacaatccgtaacagggcaggaagacgtccttaaatcgaaaggctttacgatcgttgataccttgcatgtagaggatagcagcgtcaagccactcgtctcgaagaatttcaataagaaagtggtggagaagatgggactggtgtatcttgttcaatactctccggaccagtttaaaagttccaacattgcgaagaaagaactcagaaaagaattgatggatctgggctttaaagtccgctatataagcgaaaattacaagatgatggcgatcgaaggtacagccactcttcaggcagtacaccctaaccaaaactggcattataatatgattaaagctccggaagcgtgggctattacgtctggatcctctagcgttaaagtagcagtcctggatacagggatcgaccataatcacccatccttggccaacttcgtgaatactaatcttggccggtcgtttgttggaggaaacaccatggatgttcaaggtcatggcacacatgttgctggcacgattgcatcttatgggagtgtaagcggagtgatgcagagtgcgacactgatcccggtcaaagtgctcgataattctggcagcgggtccctttacggtattacgcaaggcatattgtatgccgccgacatcgatgcggacgtcattaacatgtctctgggtggaggaggctataatcagagcatggatgaggctgttcaaacagcagttgctcagggaaccattgtagtagcagcgactggcaatgatggtgcatcgtcgatcagttatcctgctgcctacagcagcgtcattgcggtgggatctgtgacgtccaatcgttttcgatcctcgttttctaactatggatctgggcttgaagttatggcaccgggcagcaacatctacagtacgtatcctaattccagatatacatctttgagtggtacaagcatggctactccgcacgttgcgggcgtagctgggctcattcgcgcagccaacccagacatatctgtcgcgcaagcccgtcagattctgcgggataccgcgcaagaagcaggatcgttcacacagtacggctatggaatcgtcgatgctcatgccgccgttgttgctgcatccggtggtagcggcggc

SEQ ID NO: 2134 - protein, 413 aa, synthetic construct
  REGION 1..413: note = Variant of serine peptidase from Bacillus sinesaloumensis
MADQASQANGNQDVIEGELIVSVEPKNGKPDVSIQSAQSVTGQEDVLKSKGFTIVDTLHVEDSSVKPLVSKNFNKKVVEKMGLVYLVQYSPDQFKSSNIAKKELRKELMDLGFKVRYISENYKMMAIEGTATLQAVHPNQNWHYNMIKAPEAWAITSGSSSVKVAVLDTGIDHNHPSLANFVNTNLGRSFVGGNTMDVQGHGTHVAGTIASYGSVSGVMQSATLIPVKVLDNSGSGSLYGITQGILYAADIDADVINMSLGGGGYNQSMDEAVQTAVAQGTIVVAATGNDGASSISYPAAYSSVIAVGSVTSNRFRSSFSNYGSGLEVMAPGSNIYSTYPNSRYTSLSGTSMATPHVAGVAGLIRAANPDISVAQARQILRDTAQEAGSFTQYGYGIVDAHAAVVAASGGSGG

SEQ ID NO: 2135 - DNA, 1239 bp, synthetic construct
  misc_feature 1..1239: note = Variant of serine peptidase from Bacillus sinesaloumensis
  source 1..1239: mol_type = other DNA
atggcagatcaagctagtcaagctaatggaaaccaggacgtcattgaaggcgagctgatcgtttcagtggaaccgaagaacggtaaacctgatgtgagcattcaaagtgcacaatccgtaacagggcaggaagacgtccttaaatcgaaaggctttacgatcgttgataccttgcatgtagaggatagcagcgtcaagccactcgtctcgaagaatttcaataagaaagtggtggagaagatgggactggtgtatcttgttcaatactctccggaccagtttaaaagttccaacattgcgaagaaagaactcagaaaagaattgatggatctgggctttaaagtccgctatataagcgaaaattacaagatgatggcgatcgaaggtacagccactcttcaggcagtacaccctaaccaaaactggcattataatatgattaaagctccggaagcgtgggctattacgtctggatcctctagcgttaaagtagcagtcctggatacagggatcgaccataatcacccatccttggccaacttcgtgaatactaatcttggccggtcgtttgttggaggaaacaccatggatgttcaaggtcatggcacacatgttgctggcacgattgcatcttatgggagtgtaagcggagtgatgcagagtgcgacactgatcccggtcaaagtgctcgataattctggcagcgggtccctttacggtattacgcaaggcatattgtatgccgccgacatcgatgcggacgtcattaacatgtctctgggtggaggaggctataatcagagcatggatgaggctgttcaaacagcagttgctcagggaaccattgtagtagcagcgactggcaatgatggtgcatcgtcgatcagttatcctgctgcctacagcagcgtcattgcggtgggatctgtgacgtccaatcgtacacgatcctcgttttctaactatggatctgggcttgaagttatggcaccgggcagcaacatctacagtacgtatcctaattttagatatacatctttgagtggtacaagcatggctactccgcacgttgcgggcgtagctgggctcattcgcgcagccaacccagacatatctgtcgcgcaagcccgtcagattctgcgggataccgcgcaagaagcaggatcgttcacacagtacggctatggaatcgtcgatgctcatgccgccgttgttgctgcatccggtggtagcggcggc

SEQ ID NO: 2136 - protein, 413 aa, synthetic construct
  REGION 1..413: note = Variant of serine peptidase from Bacillus sinesaloumensis
MADQASQANGNQDVIEGELIVSVEPKNGKPDVSIQSAQSVTGQEDVLKSKGFTIVDTLHVEDSSVKPLVSKNFNKKVVEKMGLVYLVQYSPDQFKSSNIAKKELRKELMDLGFKVRYISENYKMMAIEGTATLQAVHPNQNWHYNMIKAPEAWAITSGSSSVKVAVLDTGIDHNHPSLANFVNTNLGRSFVGGNTMDVQGHGTHVAGTIASYGSVSGVMQSATLIPVKVLDNSGSGSLYGITQGILYAADIDADVINMSLGGGGYNQSMDEAVQTAVAQGTIVVAATGNDGASSISYPAAYSSVIAVGSVTSNRTRSSFSNYGSGLEVMAPGSNIYSTYPNFRYTSLSGTSMATPHVAGVAGLIRAANPDISVAQARQILRDTAQEAGSFTQYGYGIVDAHAAVVAASGGSGG

SEQ ID NO: 2137 - DNA, 1239 bp, synthetic construct; identical to SEQ ID NO: 449
  misc_feature 1..1239: note = Variant of serine peptidase from Bacillus sinesaloumensis
  source 1..1239: mol_type = other DNA

SEQ ID NO: 2138 - protein, 413 aa, synthetic construct; identical to SEQ ID NO: 450
  REGION 1..413: note = Variant of serine peptidase from Bacillus sinesaloumensis

SEQ ID NO: 2139 - DNA, 1239 bp, synthetic construct
  misc_feature 1..1239: note = Variant of serine peptidase from Bacillus sinesaloumensis
  source 1..1239: mol_type = other DNA
atggcagatcaagctagtcaagctaatggaaaccaggacgtcattgaaggcgagctgatcgtttcagtggaaccgaagaacggtaaacctgatgtgagcattcaaagtgcacaatccgtaacagggcaggaagacgtccttaaatcgaaaggctttacgatcgttgataccttgcatgtagaggatagcagcgtcaagccactcgtctcgaagaatttcaataagaaagtggtggagaagatgggactggtgtatcttgttcaatactctccggaccagtttaaaagttccaacattgcgaagaaagaactcagaaaagaattgatggatctgggctttaaagtccgctatataagcgaaaattacaagatgatggcgatcgaaggtacagccactcttcaggcagtacaccctaaccaaaactggcattataatatgattaaagctccggaagcgtgggctattacgtctggatcctctagcgttaaagtagcagtcctggatacagggatcgaccataatcacccatccttggccaacttcgtgaatactaatcttggccggtcgtttgttggaggaaacaccatggatgttcaaggtcatggcacacatgttgctggcacgattgcatcttatgggagtgtaagcggagtgatgcagagtgcgacactgatcccggtcaaagtgctcgataattctggcagcgggtccctttacggtattacgcaaggcatattgtatgccgccgacatcgatgcggacgtcattaacatgtctctgggtggaggaggctataatcagagcatggatgaggctgttcaaacagcagttgctcagggaaccattgtagtagcagcgactggcaatgatggtgcatcgtcgatcagttatcctgctgcctacagcagcgtcattgcggtgggatctgtgacgtccaatcgtacacgatcctcgttttctaactatggatctgggcttgaagttatggcaccgggcagcaacatctacagtacgtatcctaatcggagatatacatctttgagtggtacaagcatggctactccgcacgttgcgggcgtagctgggctcattcgcgcagccaacccagacatatctgtcgcgcaagcccgtcagattctgcgggataccgcgcaagaagcaggatcgttcacacagtacggctatggaatcgtcgatgctcatgccgccgttgttgctgcatccggtggtagcggcggc

SEQ ID NO: 2140 - protein, 413 aa, synthetic construct
  REGION 1..413: note = Variant of serine peptidase from Bacillus sinesaloumensis
MADQASQANGNQDVIEGELIVSVEPKNGKPDVSIQSAQSVTGQEDVLKSKGFTIVDTLHVEDSSVKPLVSKNFNKKVVEKMGLVYLVQYSPDQFKSSNIAKKELRKELMDLGFKVRYISENYKMMAIEGTATLQAVHPNQNWHYNMIKAPEAWAITSGSSSVKVAVLDTGIDHNHPSLANFVNTNLGRSFVGGNTMDVQGHGTHVAGTIASYGSVSGVMQSATLIPVKVLDNSGSGSLYGITQGILYAADIDADVINMSLGGGGYNQSMDEAVQTAVAQGTIVVAATGNDGASSISYPAAYSSVIAVGSVTSNRTRSSFSNYGSGLEVMAPGSNIYSTYPNRRYTSLSGTSMATPHVAGVAGLIRAANPDISVAQARQILRDTAQEAGSFTQYGYGIVDAHAAVVAASGGSGG

SEQ ID NO: 2141 - DNA, 1239 bp, synthetic construct
  misc_feature 1..1239: note = Variant of serine peptidase from Bacillus sinesaloumensis
  source 1..1239: mol_type = other DNA
atggcagatcaagctagtcaagctaatggaaaccaggacgtcattgaaggcgagctgatcgtttcagtggaaccgaagaacggtaaacctgatgtgagcattcaaagtgcacaatccgtaacagggcaggaagacgtccttaaatcgaaaggctttacgatcgttgataccttgcatgtagaggatagcagcgtcaagccactcgtctcgaagaatttcaataagaaagtggtggagaagatgggactggtgtatcttgttcaatactctccggaccagtttaaaagttccaacattgcgaagaaagaactcagaaaagaattgatggatctgggctttaaagtccgctatataagcgaaaattacaagatgatggcgatcgaaggtacagccactcttcaggcagtacaccctaaccaaaactggcattataatatgattaaagctccggaagcgtgggctattacgtctggatcctctagcgttaaagtagcagtcctggatacagggatcgaccataatcacccatccttggccaacttcgtgaatactaatcttggccggtcgtttgttggaggaaacaccatggatgttcaaggtcatggcacacatgttgctggcacgattgcatcttatgggagtgtaagcggagtgatgcagagtgcgacactgatcccggtcaaagtgctcgataattctggcagcgggtccctttacggtattacgcaaggcatattgtatgccgccgacatcgatgcggacgtcattaacatgtctctgggtggaggaggctataatcagagcatggatgaggctgttcaaacagcagttgctcagggaaccattgtagtagcagcgactggcaatgatggtgcatcgtcgatcagttatcctgctgcctacagcagcgtcattgcggtgggatctgtgacgtccaatcgtacacgatcctcgttttctaactatggatctgggcttgaagttatggcaccgggcagcaacatctacagtacgtatcctaatcagagatatacatctttgagtggtacaagcatggctactccgcacgttgcgggcgtagctgggctcattcgcgcagccaacccagacatatctgtcgcgcaagcccgtcagattctgcgggataccgcgcaagaagcaggatcgttcacacagtacggctatggaatcgtcgatgctcatgccgccgttgttgctgcatccggtggtagcggcggc

SEQ ID NO: 2142 - protein, 413 aa, synthetic construct
  REGION 1..413: note = Variant of serine peptidase from Bacillus sinesaloumensis
MADQASQANGNQDVIEGELIVSVEPKNGKPDVSIQSAQSVTGQEDVLKSKGFTIVDTLHVEDSSVKPLVSKNFNKKVVEKMGLVYLVQYSPDQFKSSNIAKKELRKELMDLGFKVRYISENYKMMAIEGTATLQAVHPNQNWHYNMIKAPEAWAITSGSSSVKVAVLDTGIDHNHPSLANFVNTNLGRSFVGGNTMDVQGHGTHVAGTIASYGSVSGVMQSATLIPVKVLDNSGSGSLYGITQGILYAADIDADVINMSLGGGGYNQSMDEAVQTAVAQGTIVVAATGNDGASSISYPAAYSSVIAVGSVTSNRTRSSFSNYGSGLEVMAPGSNIYSTYPNQRYTSLSGTSMATPHVAGVAGLIRAANPDISVAQARQILRDTAQEAGSFTQYGYGIVDAHAAVVAASGGSGG

SEQ ID NO: 2143 - DNA, 1239 bp, synthetic construct
  misc_feature 1..1239: note = Variant of serine peptidase from Bacillus sinesaloumensis
  source 1..1239: mol_type = other DNA
atggcagatcaagctagtcaagctaatggaaaccaggacgtcattgaaggcgagctgatcgtttcagtggaaccgaagaacggtaaacctgatgtgagcattcaaagtgcacaatccgtaacagggcaggaagacgtccttaaatcgaaaggctttacgatcgttgataccttgcatgtagaggatagcagcgtcaagccactcgtctcgaagaatttcaataagaaagtggtggagaagatgggactggtgtatcttgttcaatactctccggaccagtttaaaagttccaacattgcgaagaaagaactcagaaaagaattgatggatctgggctttaaagtccgctatataagcgaaaattacaagatgatggcgatcgaaggtacagccactcttcaggcagtacaccctaaccaaaactggcattataatatgattaaagctccggaagcgtgggctattacgtctggatcctctagcgttaaagtagcagtcctggatacagggatcgaccataatcacccatccttggccaacttcgtgaatactaatcttggccggtcgtttgttggaggaaacaccatggatgttcaaggtcatggcacacatgttgctggcacgattgcatcttatgggagtgtaagcggagtgatgcagagtgcgacactgatcccggtcaaagtgctcgataattctggcagcgggtccctttacggtattacgcaaggcatattgtatgccgccgacatcgatgcggacgtcattaacatgtctctgggtggaggaggctataatcagagcatggatgaggctgttcaaacagcagttgctcagggaaccattgtagtagcagcgactggcaatgatggtgcatcgtcgatcagttatcctgctgcctacagcagcgtcattgcggtgggatctgtgacgtccaatcgtacacgatcctcgttttctaactatggatctgggcttgaagttatggcaccgggcagcaacatctacagtacgtatcctaatgagagatatacatctttgagtggtacaagcatggctactccgcacgttgcgggcgtagctgggctcattcgcgcagccaacccagacatatctgtcgcgcaagcccgtcagattctgcgggataccgcgcaagaagcaggatcgttcacacagtacggctatggaatcgtcgatgctcatgccgccgttgttgctgcatccggtggtagcggcggc

SEQ ID NO: 2144 - protein, 413 aa, synthetic construct
  REGION 1..413: note = Variant of serine peptidase from Bacillus sinesaloumensis
MADQASQANGNQDVIEGELIVSVEPKNGKPDVSIQSAQSVTGQEDVLKSKGFTIVDTLHVEDSSVKPLVSKNFNKKVVEKMGLVYLVQYSPDQFKSSNIAKKELRKELMDLGFKVRYISENYKMMAIEGTATLQAVHPNQNWHYNMIKAPEAWAITSGSSSVKVAVLDTGIDHNHPSLANFVNTNLGRSFVGGNTMDVQGHGTHVAGTIASYGSVSGVMQSATLIPVKVLDNSGSGSLYGITQGILYAADIDADVINMSLGGGGYNQSMDEAVQTAVAQGTIVVAATGNDGASSISYPAAYSSVIAVGSVTSNRTRSSFSNYGSGLEVMAPGSNIYSTYPNERYTSLSGTSMATPHVAGVAGLIRAANPDISVAQARQILRDTAQEAGSFTQYGYGIVDAHAAVVAASGGSGG

SEQ ID NO: 2145 - DNA, 1239 bp, synthetic construct
  misc_feature 1..1239: note = Variant of serine peptidase from Bacillus sinesaloumensis
  source 1..1239: mol_type = other DNA
atggcagatcaagctagtcaagctaatggaaaccaggacgtcattgaaggcgagctgatcgtttcagtggaaccgaagaacggtaaacctgatgtgagcattcaaagtgcacaatccgtaacagggcaggaagacgtccttaaatcgaaaggctttacgatcgttgataccttgcatgtagaggatagcagcgtcaagccactcgtctcgaagaatttcaataagaaagtggtggagaagatgggactggtgtatcttgttcaatactctccggaccagtttaaaagttccaacattgcgaagaaagaactcagaaaagaattgatggatctgggctttaaagtccgctatataagcgaaaattacaagatgatggcgatcgaaggtacagccactcttcaggcagtacaccctaaccaaaactggcattataatatgattaaagctccggaagcgtgggctattacgtctggatcctctagcgttaaagtagcagtcctggatacagggatcgaccataatcacccatccttggccaacttcgtgaatactaatcttggccggtcgtttgttggaggaaacaccatggatgttcaaggtcatggcacacatgttgctggcacgattgcatcttatgggagtgtaagcggagtgatgcagagtgcgacactgatcccggtcaaagtgctcgataattctggcagcgggtccctttacggtattacgcaaggcatattgtatgccgccgacatcgatgcggacgtcattaacatgtctctgggtggaggaggctataatcagagcatggatgaggctgttcaaacagcagttgctcagggaaccattgtagtagcagcgactggcaatgatggtgcatcgtcgatcagttatcctgctgcctacagcagcgtcattgcggtgggatctgtgacgtccaatcgtacacgatcctcgttttctaactatggatctgggcttgaagttatggcaccgggcagcaacatctacagtacgtatcctaatgtgagatatacatctttgagtggtacaagcatggctactccgcacgttgcgggcgtagctgggctcattcgcgcagccaacccagacatatctgtcgcgcaagcccgtcagattctgcgggataccgcgcaagaagcaggatcgttcacacagtacggctatggaatcgtcgatgctcatgccgccgttgttgctgcatccggtggtagcggcggc

SEQ ID NO: 2146 - protein, 413 aa, synthetic construct
  REGION 1..413: note = Variant of serine peptidase from Bacillus sinesaloumensis
MADQASQANGNQDVIEGELIVSVEPKNGKPDVSIQSAQSVTGQEDVLKSKGFTIVDTLHVEDSSVKPLVSKNFNKKVVEKMGLVYLVQYSPDQFKSSNIAKKELRKELMDLGFKVRYISENYKMMAIEGTATLQAVHPNQNWHYNMIKAPEAWAITSGSSSVKVAVLDTGIDHNHPSLANFVNTNLGRSFVGGNTMDVQGHGTHVAGTIASYGSVSGVMQSATLIPVKVLDNSGSGSLYGITQGILYAADIDADVINMSLGGGGYNQSMDEAVQTAVAQGTIVVAATGNDGASSISYPAAYSSVIAVGSVTSNRTRSSFSNYGSGLEVMAPGSNIYSTYPNVRYTSLSGTSMATPHVAGVAGLIRAANPDISVAQARQILRDTAQEAGSFTQYGYGIVDAHAAVVAASGGSGG

SEQ ID NO: 2147 - DNA, 1239 bp, synthetic construct
  misc_feature 1..1239: note = Variant of serine peptidase from Bacillus sinesaloumensis
  source 1..1239: mol_type = other DNA
atggcagatcaagctagtcaagctaatggaaaccaggacgtcattgaaggcgagctgatcgtttcagtggaaccgaagaacggtaaacctgatgtgagcattcaaagtgcacaatccgtaacagggcaggaagacgtccttaaatcgaaaggctttacgatcgttgataccttgcatgtagaggatagcagcgtcaagccactcgtctcgaagaatttcaataagaaagtggtggagaagatgggactggtgtatcttgttcaatactctccggaccagtttaaaagttccaacattgcgaagaaagaactcagaaaagaattgatggatctgggctttaaagtccgctatataagcgaaaattacaagatgatggcgatcgaaggtacagccactcttcaggcagtacaccctaaccaaaactggcattataatatgattaaagctccggaagcgtgggctattacgtctggatcctctagcgttaaagtagcagtcctggatacagggatcgaccataatcacccatccttggccaacttcgtgaatactaatcttggccggtcgtttgttggaggaaacaccatggatgttcaaggtcatggcacacatgttgctggcacgattgcatcttatgggagtgtaagcggagtgatgcagagtgcgacactgatcccggtcaaagtgctcgataattctggcagcgggtccctttacggtattacgcaaggcatattgtatgccgccgacatcgatgcggacgtcattaacatgtctctgggtggaggaggctataatcagagcatggatgaggctgttcaaacagcagttgctcagggaaccattgtagtagcagcgactggcaatgatggtgcatcgtcgatcagttatcctgctgcctacagcagcgtcattgcggtgggatctgtgacgtccaatcgtacacgatcctcgttttctaactatggatctgggcttgaagttatggcaccgggcagcaacatctacagtacgtatcctaatactagatatacatctttgagtggtacaagcatggctactccgcacgttgcgggcgtagctgggctcattcgcgcagccaacccagacatatctgtcgcgcaagcccgtcagattctgcgggataccgcgcaagaagcaggatcgttcacacagtacggctatggaatcgtcgatgctcatgccgccgttgttgctgcatccggtggtagcggcggc

SEQ ID NO: 2148 - protein, 413 aa, synthetic construct
  REGION 1..413: note = Variant of serine peptidase from Bacillus sinesaloumensis
MADQASQANGNQDVIEGELIVSVEPKNGKPDVSIQSAQSVTGQEDVLKSKGFTIVDTLHVEDSSVKPLVSKNFNKKVVEKMGLVYLVQYSPDQFKSSNIAKKELRKELMDLGFKVRYISENYKMMAIEGTATLQAVHPNQNWHYNMIKAPEAWAITSGSSSVKVAVLDTGIDHNHPSLANFVNTNLGRSFVGGNTMDVQGHGTHVAGTIASYGSVSGVMQSATLIPVKVLDNSGSGSLYGITQGILYAADIDADVINMSLGGGGYNQSMDEAVQTAVAQGTIVVAATGNDGASSISYPAAYSSVIAVGSVTSNRTRSSFSNYGSGLEVMAPGSNIYSTYPNTRYTSLSGTSMATPHVAGVAGLIRAANPDISVAQARQILRDTAQEAGSFTQYGYGIVDAHAAVVAASGGSGG

SEQ ID NO: 2149 - DNA, 1239 bp, synthetic construct
  misc_feature 1..1239: note = Variant of serine peptidase from Bacillus sinesaloumensis
  source 1..1239: mol_type = other DNA
atggcagatcaagctagtcaagctaatggaaaccaggacgtcattgaaggcgagctgatcgtttcagtggaaccgaagaacggtaaacctgatgtgagcattcaaagtgcacaatccgtaacagggcaggaagacgtccttaaatcgaaaggctttacgatcgttgataccttgcatgtagaggatagcagcgtcaagccactcgtctcgaagaatttcaataagaaagtggtggagaagatgggactggtgtatcttgttcaatactctccggaccagtttaaaagttccaacattgcgaagaaagaactcagaaaagaattgatggatctgggctttaaagtccgctatataagcgaaaattacaagatgatggcgatcgaaggtacagccactcttcaggcagtacaccctaaccaaaactggcattataatatgattaaagctccggaagcgtgggctattacgtctggatcctctagcgttaaagtagcagtcctggatacagggatcgaccataatcacccatccttggccaacttcgtgaatactaatcttggccggtcgtttgttggaggaaacaccatggatgttcaaggtcatggcacacatgttgctggcacgattgcatcttatgggagtgtaagcggagtgatgcagagtgcgacactgatcccggtcaaagtgctcgataattctggcagcgggtccctttacggtattacgcaaggcatattgtatgccgccgacatcgatgcggacgtcattaacatgtctctgggtggaggaggctataatcagagcatggatgaggctgttcaaacagcagttgctcagggaaccattgtagtagcagcgactggcaatgatggtgcatcgtcgatcagttatcctgctgcctacagcagcgtcattgcggtgggatctgtgacgtccaatcgtacacgatcctcgttttctaactatggatctgggcttgaagttatggcaccgggcagcaacatctacagtacgtatcctaattgtagatatacatctttgagtggtacaagcatggctactccgcacgttgcgggcgtagctgggctcattcgcgcagccaacccagacatatctgtcgcgcaagcccgtcagattctgcgggataccgcgcaagaagcaggatcgttcacacagtacggctatggaatcgtcgatgctcatgccgccgttgttgctgcatccggtggtagcggcggc

SEQ ID NO: 2150 - protein, 413 aa, synthetic construct
  REGION 1..413: note = Variant of serine peptidase from Bacillus sinesaloumensis
MADQASQANGNQDVIEGELIVSVEPKNGKPDVSIQSAQSVTGQEDVLKSKGFTIVDTLHVEDSSVKPLVSKNFNKKVVEKMGLVYLVQYSPDQFKSSNIAKKELRKELMDLGFKVRYISENYKMMAIEGTATLQAVHPNQNWHYNMIKAPEAWAITSGSSSVKVAVLDTGIDHNHPSLANFVNTNLGRSFVGGNTMDVQGHGTHVAGTIASYGSVSGVMQSATLIPVKVLDNSGSGSLYGITQGILYAADIDADVINMSLGGGGYNQSMDEAVQTAVAQGTIVVAATGNDGASSISYPAAYSSVIAVGSVTSNRTRSSFSNYGSGLEVMAPGSNIYSTYPNCRYTSLSGTSMATPHVAGVAGLIRAANPDISVAQARQILRDTAQEAGSFTQYGYGIVDAHAAVVAASGGSGG

SEQ ID NO: 2151 - DNA, 1239 bp, synthetic construct
  misc_feature 1..1239: note = Variant of serine peptidase from Bacillus sinesaloumensis
  source 1..1239: mol_type = other DNA
atggcagatcaagctagtcaagctaatggaaaccaggacgtcattgaaggcgagctgatcgtttcagtggaaccgaagaacggtaaacctgatgtgagcattcaaagtgcacaatccgtaacagggcaggaagacgtccttaaatcgaaaggctttacgatcgttgataccttgcatgtagaggatagcagcgtcaagccactcgtctcgaagaatttcaataagaaagtggtggagaagatgggactggtgtatcttgttcaatactctccggaccagtttaaaagttccaacattgcgaagaaagaactcagaaaagaattgatggatctgggctttaaagtccgctatataagcgaaaattacaagatgatggcgatcgaaggtacagccactcttcaggcagtacaccctaaccaaaactggcattataatatgattaaagctccggaagcgtgggctattacgtctggatcctctagcgttaaagtagcagtcctggatacagggatcgaccataatcacccatccttggccaacttcgtgaatactaatcttggccggtcgtttgttggaggaaacaccatggatgttcaaggtcatggcacacatgttgctggcacgattgcatcttatgggagtgtaagcggagtgatgcagagtgcgacactgatcccggtcaaagtgctcgataattctggcagcgggtccctttacggtattacgcaaggcatattgtatgccgccgacatcgatgcggacgtcattaacatgtctctgggtggaggaggctataatcagagcatggatgaggctgttcaaacagcagttgctcagggaaccattgtagtagcagcgactggcaatgatggtgcatcgtcgatcagttatcctgctgcctacagcagcgtcattgcggtgggatctgtgacgtccaatcgtacacgatcctcgttttctaactatggatctgggcttgaagttatggcaccgggcagcaacatctacagtacgtatcctaataatagatatacatctttgagtggtacaagcatggctactccgcacgttgcgggcgtagctgggctcattcgcgcagccaacccagacatatctgtcgcgcaagcccgtcagattctgcgggataccgcgcaagaagcaggatcgttcacacagtacggctatggaatcgtcgatgctcatgccgccgttgttgctgcatccggtggtagcggcggc

SEQ ID NO: 2152 - protein, 413 aa, synthetic construct
  REGION 1..413: note = Variant of serine peptidase from Bacillus sinesaloumensis
MADQASQANGNQDVIEGELIVSVEPKNGKPDVSIQSAQSVTGQEDVLKSKGFTIVDTLHVEDSSVKPLVSKNFNKKVVEKMGLVYLVQYSPDQFKSSNIAKKELRKELMDLGFKVRYISENYKMMAIEGTATLQAVHPNQNWHYNMIKAPEAWAITSGSSSVKVAVLDTGIDHNHPSLANFVNTNLGRSFVGGNTMDVQGHGTHVAGTIASYGSVSGVMQSATLIPVKVLDNSGSGSLYGITQGILYAADIDADVINMSLGGGGYNQSMDEAVQTAVAQGTIVVAATGNDGASSISYPAAYSSVIAVGSVTSNRTRSSFSNYGSGLEVMAPGSNIYSTYPNNRYTSLSGTSMATPHVAGVAGLIRAANPDISVAQARQILRDTAQEAGSFTQYGYGIVDAHAAVVAASGGSGG

SEQ ID NO: 2153 - DNA, 1239 bp, synthetic construct
  misc_feature 1..1239: note = Variant of serine peptidase from Bacillus sinesaloumensis
  source 1..1239: mol_type = other DNA
atggcagatcaagctagtcaagctaatggaaaccaggacgtcattgaaggcgagctgatcgtttcagtggaaccgaagaacggtaaacctgatgtgagcattcaaagtgcacaatccgtaacagggcaggaagacgtccttaaatcgaaaggctttacgatcgttgataccttgcatgtagaggatagcagcgtcaagccactcgtctcgaagaatttcaataagaaagtggtggagaagatgggactggtgtatcttgttcaatactctccggaccagtttaaaagttccaacattgcgaagaaagaactcagaaaagaattgatggatctgggctttaaagtccgctatataagcgaaaattacaagatgatggcgatcgaaggtacagccactcttcaggcagtacaccctaaccaaaactggcattataatatgattaaagctccggaagcgtgggctattacgtctggatcctctagcgttaaagtagcagtcctggatacagggatcgaccataatcacccatccttggccaacttcgtgaatactaatcttggccggtcgtttgttggaggaaacaccatggatgttcaaggtcatggcacacatgttgctggcacgattgcatcttatgggagtgtaagcggagtgatgcagagtgcgacactgatcccggtcaaagtgctcgataattctggcagcgggtccctttacggtattacgcaaggcatattgtatgccgccgacatcgatgcggacgtcattaacatgtctctgggtggaggaggctataatcagagcatggatgaggctgttcaaacagcagttgctcagggaaccattgtagtagcagcgactggcaatgatggtgcatcgtcgatcagttatcctgctgcctacagcagcgtcattgcggtgggatctgtgacgtccaatcgtacacgatcctcgttttctaactatggatctgggcttgaagttatggcaccgggcagcaacatctacagtacgtatcctaatattagatatacatctttgagtggtacaagcatggctactccgcacgttgcgggcgtagctgggctcattcgcgcagccaacccagacatatctgtcgcgcaagcccgtcagattctgcgggataccgcgcaagaagcaggatcgttcacacagtacggctatggaatcgtcgatgctcatgccgccgttgttgctgcatccggtggtagcggcggc

SEQ ID NO: 2154 - protein, 413 aa, synthetic construct
  REGION 1..413: note = Variant of serine peptidase from Bacillus sinesaloumensis
MADQASQANGNQDVIEGELIVSVEPKNGKPDVSIQSAQSVTGQEDVLKSKGFTIVDTLHVEDSSVKPLVSKNFNKKVVEKMGLVYLVQYSPDQFKSSNIAKKELRKELMDLGFKVRYISENYKMMAIEGTATLQAVHPNQNWHYNMIKAPEAWAITSGSSSVKVAVLDTGIDHNHPSLANFVNTNLGRSFVGGNTMDVQGHGTHVAGTIASYGSVSGVMQSATLIPVKVLDNSGSGSLYGITQGILYAADIDADVINMSLGGGGYNQSMDEAVQTAVAQGTIVVAATGNDGASSISYPAAYSSVIAVGSVTSNRTRSSFSNYGSGLEVMAPGSNIYSTYPNIRYTSLSGTSMATPHVAGVAGLIRAANPDISVAQARQILRDTAQEAGSFTQYGYGIVDAHAAVVAASGGSGG

SEQ ID NO: 2155 - DNA, 1239 bp, synthetic construct
  misc_feature 1..1239: note = Variant of serine peptidase from Bacillus sinesaloumensis
  source 1..1239: mol_type = other DNA
atggcagatcaagctagtcaagctaatggaaaccaggacgtcattgaaggcgagctgatcgtttcagtggaaccgaagaacggtaaacctgatgtgagcattcaaagtgcacaatccgtaacagggcaggaagacgtccttaaatcgaaaggctttacgatcgttgataccttgcatgtagaggatagcagcgtcaagccactcgtctcgaagaatttcaataagaaagtggtggagaagatgggactggtgtatcttgttcaatactctccggaccagtttaaaagttccaacattgcgaagaaagaactcagaaaagaattgatggatctgggctttaaagtccgctatataagcgaaaattacaagatgatggcgatcgaaggtacagccactcttcaggcagtacaccctaaccaaaactggcattataatatgattaaagctccggaagcgtgggctattacgtctggatcctctagcgttaaagtagcagtcctggatacagggatcgaccataatcacccatccttggccaacttcgtgaatactaatcttggccggtcgtttgttggaggaaacaccatggatgttcaaggtcatggcacacatgttgctggcacgattgcatcttatgggagtgtaagcggagtgatgcagagtgcgacactgatcccggtcaaagtgctcgataattctggcagcgggtccctttacggtattacgcaaggcatattgtatgccgccgacatcgatgcggacgtcattaacatgtctctgggtggaggaggctataatcagagcatggatgaggctgttcaaacagcagttgctcagggaaccattgtagtagcagcgactggcaatgatggtgcatcgtcgatcagttatcctgctgcctacagcagcgtcattgcggtgggatctgtgacgtccaatcgtacacgatcctcgttttctaactatggatctgggcttgaagttatggcaccgggcagcaacatctacagtacgtatcctaatcctagatatacatctttgagtggtacaagcatggctactccgcacgttgcgggcgtagctgggctcattcgcgcagccaacccagacatatctgtcgcgcaagcccgtcagattctgcgggataccgcgcaagaagcaggatcgttcacacagtacggctatggaatcgtcgatgctcatgccgccgttgttgctgcatccggtggtagcggcggc

SEQ ID NO: 2156 - protein, 413 aa, synthetic construct
  REGION 1..413: note = Variant of serine peptidase from Bacillus sinesaloumensis
MADQASQANGNQDVIEGELIVSVEPKNGKPDVSIQSAQSVTGQEDVLKSKGFTIVDTLHVEDSSVKPLVSKNFNKKVVEKMGLVYLVQYSPDQFKSSNIAKKELRKELMDLGFKVRYISENYKMMAIEGTATLQAVHPNQNWHYNMIKAPEAWAITSGSSSVKVAVLDTGIDHNHPSLANFVNTNLGRSFVGGNTMDVQGHGTHVAGTIASYGSVSGVMQSATLIPVKVLDNSGSGSLYGITQGILYAADIDADVINMSLGGGGYNQSMDEAVQTAVAQGTIVVAATGNDGASSISYPAAYSSVIAVGSVTSNRTRSSFSNYGSGLEVMAPGSNIYSTYPNPRYTSLSGTSMATPHVAGVAGLIRAANPDISVAQARQILRDTAQEAGSFTQYGYGIVDAHAAVVAASGGSGG

SEQ ID NO: 2157 - DNA, 1239 bp, synthetic construct
  misc_feature 1..1239: note = Variant of serine peptidase from Bacillus sinesaloumensis
  source 1..1239: mol_type = other DNA
atggcagatcaagctagtcaagctaatggaaaccaggacgtcattgaaggcgagctgatcgtttcagtggaaccgaagaacggtaaacctgatgtgagcattcaaagtgcacaatccgtaacagggcaggaagacgtccttaaatcgaaaggctttacgatcgttgataccttgcatgtagaggatagcagcgtcaagccactcgtctcgaagaatttcaataagaaagtggtggagaagatgggactggtgtatcttgttcaatactctccggaccagtttaaaagttccaacattgcgaagaaagaactcagaaaagaattgatggatctgggctttaaagtccgctatataagcgaaaattacaagatgatggcgatcgaaggtacagccactcttcaggcagtacaccctaaccaaaactggcattataatatgattaaagctccggaagcgtgggctattacgtctggatcctctagcgttaaagtagcagtcctggatacagggatcgaccataatcacccatccttggccaacttcgtgaatactaatcttggccggtcgtttgttggaggaaacaccatggatgttcaaggtcatggcacacatgttgctggcacgattgcatcttatgggagtgtaagcggagtgatgcagagtgcgacactgatcccggtcaaagtgctcgataattctggcagcgggtccctttacggtattacgcaaggcatattgtatgccgccgacatcgatgcggacgtcattaacatgtctctgggtggaggaggctataatcagagcatggatgaggctgttcaaacagcagttgctcagggaaccattgtagtagcagcgactggcaatgatggtgcatcgtcgatcagttatcctgctgcctacagcagcgtcattgcggtgggatctgtgacgtccaatcgtacacgatcctcgttttctaactatggatctgggcttgaagttatggcaccgggcagcaacatctacagtacgtatcctaatatgagatatacatctttgagtggtacaagcatggctactccgcacgttgcgggcgtagctgggctcattcgcgcagccaacccagacatatctgtcgcgcaagcccgtcagattctgcgggataccgcgcaagaagcaggatcgttcacacagtacggctatggaatcgtcgatgctcatgccgccgttgttgctgcatccggtggtagcggcggc

SEQ ID NO: 2158 - protein, 413 aa, synthetic construct
  REGION 1..413: note = Variant of serine peptidase from Bacillus sinesaloumensis
MADQASQANGNQDVIEGELIVSVEPKNGKPDVSIQSAQSVTGQEDVLKSKGFTIVDTLHVEDSSVKPLVSKNFNKKVVEKMGLVYLVQYSPDQFKSSNIAKKELRKELMDLGFKVRYISENYKMMAIEGTATLQAVHPNQNWHYNMIKAPEAWAITSGSSSVKVAVLDTGIDHNHPSLANFVNTNLGRSFVGGNTMDVQGHGTHVAGTIASYGSVSGVMQSATLIPVKVLDNSGSGSLYGITQGILYAADIDADVINMSLGGGGYNQSMDEAVQTAVAQGTIVVAATGNDGASSISYPAAYSSVIAVGSVTSNRTRSSFSNYGSGLEVMAPGSNIYSTYPNMRYTSLSGTSMATPHVAGVAGLIRAANPDISVAQARQILRDTAQEAGSFTQYGYGIVDAHAAVVAASGGSGG

SEQ ID NO: 2159 - DNA, 1239 bp, synthetic construct
  misc_feature 1..1239: note = Variant of serine peptidase from Bacillus sinesaloumensis
  source 1..1239: mol_type = other DNA
atggcagatcaagctagtcaagctaatggaaaccaggacgtcattgaaggcgagctgatcgtttcagtggaaccgaagaacggtaaacctgatgtgagcattcaaagtgcacaatccgtaacagggcaggaagacgtccttaaatcgaaaggctttacgatcgttgataccttgcatgtagaggatagcagcgtcaagccactcgtctcgaagaatttcaataagaaagtggtggagaagatgggactggtgtatcttgttcaatactctccggaccagtttaaaagttccaacattgcgaagaaagaactcagaaaagaattgatggatctgggctttaaagtccgctatataagcgaaaattacaagatgatggcgatcgaaggtacagccactcttcaggcagtacaccctaaccaaaactggcattataatatgattaaagctccggaagcgtgggctattacgtctggatcctctagcgttaaagtagcagtcctggatacagggatcgaccataatcacccatccttggccaacttcgtgaatactaatcttggccggtcgtttgttggaggaaacaccatggatgttcaaggtcatggcacacatgttgctggcacgattgcatcttatgggagtgtaagcggagtgatgcagagtgcgacactgatcccggtcaaagtgctcgataattctggcagcgggtccctttacggtattacgcaaggcatattgtatgccgccgacatcgatgcggacgtcattaacatgtctctgggtggaggaggctataatcagagcatggatgaggctgttcaaacagcagttgctcagggaaccattgtagtagcagcgactggcaatgatggtgcatcgtcgatcagttatcctgctgcctacagcagcgtcattgcggtgggatctgtgacgtccaatcgtacacgatcctcgttttctaactatggatctgggcttgaagttatggcaccgggcagcaacatctacagtacgtatcctaatgctagatatacatctttgagtggtacaagcatggctactccgcacgttgcgggcgtagctgggctcattcgcgcagccaacccagacatatctgtcgcgcaagcccgtcagattctgcgggataccgcgcaagaagcaggatcgttcacacagtacggctatggaatcgtcgatgctcatgccgccgttgttgctgcatccggtggtagcggcggc

SEQ ID NO: 2160 - protein, 413 aa, synthetic construct
  REGION 1..413: note = Variant of serine peptidase from Bacillus sinesaloumensis
MADQASQANGNQDVIEGELIVSVEPKNGKPDVSIQSAQSVTGQEDVLKSKGFTIVDTLHVEDSSVKPLVSKNFNKKVVEKMGLVYLVQYSPDQFKSSNIAKKELRKELMDLGFKVRYISENYKMMAIEGTATLQAVHPNQNWHYNMIKAPEAWAITSGSSSVKVAVLDTGIDHNHPSLANFVNTNLGRSFVGGNTMDVQGHGTHVAGTIASYGSVSGVMQSATLIPVKVLDNSGSGSLYGITQGILYAADIDADVINMSLGGGGYNQSMDEAVQTAVAQGTIVVAATGNDGASSISYPAAYSSVIAVGSVTSNRTRSSFSNYGSGLEVMAPGSNIYSTYPNARYTSLSGTSMATPHVAGVAGLIRAANPDISVAQARQILRDTAQEAGSFTQYGYGIVDAHAAVVAASGGSGG

SEQ ID NO: 2161 - DNA, 1239 bp, synthetic construct
  misc_feature 1..1239: note = Variant of serine peptidase from Bacillus sinesaloumensis
  source 1..1239: mol_type = other DNA
atggcagatcaagctagtcaagctaatggaaaccaggacgtcattgaaggcgagctgatcgtttcagtggaaccgaagaacggtaaacctgatgtgagcattcaaagtgcacaatccgtaacagggcaggaagacgtccttaaatcgaaaggctttacgatcgttgataccttgcatgtagaggatagcagcgtcaagccactcgtctcgaagaatttcaataagaaagtggtggagaagatgggactggtgtatcttgttcaatactctccggaccagtttaaaagttccaacattgcgaagaaagaactcagaaaagaattgatggatctgggctttaaagtccgctatataagcgaaaattacaagatgatggcgatcgaaggtacagccactcttcaggcagtacaccctaaccaaaactggcattataatatgattaaagctccggaagcgtgggctattacgtctggatcctctagcgttaaagtagcagtcctggatacagggatcgaccataatcacccatccttggccaacttcgtgaatactaatcttggccggtcgtttgttggaggaaacaccatggatgttcaaggtcatggcacacatgttgctggcacgattgcatcttatgggagtgtaagcggagtgatgcagagtgcgacactgatcccggtcaaagtgctcgataattctggcagcgggtccctttacggtattacgcaaggcatattgtatgccgccgacatcgatgcggacgtcattaacatgtctctgggtggaggaggctataatcagagcatggatgaggctgttcaaacagcagttgctcagggaaccattgtagtagcagcgactggcaatgatggtgcatcgtcgatcagttatcctgctgcctacagcagcgtcattgcggtgggatctgtgacgtccaatcgtacacgatcctcgttttctaactatggatctgggcttgaagttatggcaccgggcagcaacatctacagtacgtatcctaattggagatatacatctttgagtggtacaagcatggctactccgcacgttgcgggcgtagctgggctcattcgcgcagccaacccagacatatctgtcgcgcaagcccgtcagattctgcgggataccgcgcaagaagcaggatcgttcacacagtacggctatggaatcgtcgatgctcatgccgccgttgttgctgcatccggtggtagcggcggc

SEQ ID NO: 2162 - protein, 413 aa, synthetic construct
  REGION 1..413: note = Variant of serine peptidase from Bacillus sinesaloumensis
MADQASQANGNQDVIEGELIVSVEPKNGKPDVSIQSAQSVTGQEDVLKSKGFTIVDTLHVEDSSVKPLVSKNFNKKVVEKMGLVYLVQYSPDQFKSSNIAKKELRKELMDLGFKVRYISENYKMMAIEGTATLQAVHPNQNWHYNMIKAPEAWAITSGSSSVKVAVLDTGIDHNHPSLANFVNTNLGRSFVGGNTMDVQGHGTHVAGTIASYGSVSGVMQSATLIPVKVLDNSGSGSLYGITQGILYAADIDADVINMSLGGGGYNQSMDEAVQTAVAQGTIVVAATGNDGASSISYPAAYSSVIAVGSVTSNRTRSSFSNYGSGLEVMAPGSNIYSTYPNWRYTSLSGTSMATPHVAGVAGLIRAANPDISVAQARQILRDTAQEAGSFTQYGYGIVDAHAAVVAASGGSGG

SEQ ID NO: 2163 - DNA, 1239 bp, synthetic construct
  misc_feature 1..1239: note = Variant of serine peptidase from Bacillus sinesaloumensis
  source 1..1239: mol_type = other DNA
atggcagatcaagctagtcaagctaatggaaaccaggacgtcattgaaggcgagctgatcgtttcagtggaaccgaagaacggtaaacctgatgtgagcattcaaagtgcacaatccgtaacagggcaggaagacgtccttaaatcgaaaggctttacgatcgttgataccttgcatgtagaggatagcagcgtcaagccactcgtctcgaagaatttcaataagaaagtggtggagaagatgggactggtgtatcttgttcaatactctccggaccagtttaaaagttccaacattgcgaagaaagaactcagaaaagaattgatggatctgggctttaaagtccgctatataagcgaaaattacaagatgatggcgatcgaaggtacagccactcttcaggcagtacaccctaaccaaaactggcattataatatgattaaagctccggaagcgtgggctattacgtctggatcctctagcgttaaagtagcagtcctggatacagggatcgaccataatcacccatccttggccaacttcgtgaatactaatcttggccggtcgtttgttggaggaaacaccatggatgttcaaggtcatggcacacatgttgctggcacgattgcatcttatgggagtgtaagcggagtgatgcagagtgcgacactgatcccggtcaaagtgctcgataattctggcagcgggtccctttacggtattacgcaaggcatattgtatgccgccgacatcgatgcggacgtcattaacatgtctctgggtggaggaggctataatcagagcatggatgaggctgttcaaacagcagttgctcagggaaccattgtagtagcagcgactggcaatgatggtgcatcgtcgatcagttatcctgctgcctacagcagcgtcattgcggtgggatctgtgacgtccaatcgtacacgatcctcgttttctaactatggatctgggcttgaagttatggcaccgggcagcaacatctacagtacgtatcctaataagagatatacatctttgagtggtacaagcatggctactccgcacgttgcgggcgtagctgggctcattcgcgcagccaacccagacatatctgtcgcgcaagcccgtcagattctgcgggataccgcgcaagaagcaggatcgttcacacagtacggctatggaatcgtcgatgctcatgccgccgttgttgctgcatccggtggtagcggcggc

SEQ ID NO: 2164 - protein, 413 aa, synthetic construct
  REGION 1..413: note = Variant of serine peptidase from Bacillus sinesaloumensis
MADQASQANGNQDVIEGELIVSVEPKNGKPDVSIQSAQSVTGQEDVLKSKGFTIVDTLHVEDSSVKPLVSKNFNKKVVEKMGLVYLVQYSPDQFKSSNIAKKELRKELMDLGFKVRYISENYKMMAIEGTATLQAVHPNQNWHYNMIKAPEAWAITSGSSSVKVAVLDTGIDHNHPSLANFVNTNLGRSFVGGNTMDVQGHGTHVAGTIASYGSVSGVMQSATLIPVKVLDNSGSGSLYGITQGILYAADIDADVINMSLGGGGYNQSMDEAVQTAVAQGTIVVAATGNDGASSISYPAAYSSVIAVGSVTSNRTRSSFSNYGSGLEVMAPGSNIYSTYPNKRYTSLSGTSMATPHVAGVAGLIRAANPDISVAQARQILRDTAQEAGSFTQYGYGIVDAHAAVVAASGGSGG

SEQ ID NO: 2165 - DNA, 1239 bp, synthetic construct
  misc_feature 1..1239: note = Variant of serine peptidase from Bacillus sinesaloumensis
  source 1..1239: mol_type = other DNA
atggcagatcaagctagtcaagctaatggaaaccaggacgtcattgaaggcgagctgatcgtttcagtggaaccgaagaacggtaaacctgatgtgagcattcaaagtgcacaatccgtaacagggcaggaagacgtccttaaatcgaaaggctttacgatcgttgataccttgcatgtagaggatagcagcgtcaagccactcgtctcgaagaatttcaataagaaagtggtggagaagatgggactggtgtatcttgttcaatactctccggaccagtttaaaagttccaacattgcgaagaaagaactcagaaaagaattgatggatctgggctttaaagtccgctatataagcgaaaattacaagatgatggcgatcgaaggtacagccactcttcaggcagtacaccctaaccaaaactggcattataatatgattaaagctccggaagcgtgggctattacgtctggatcctctagcgttaaagtagcagtcctggatacagggatcgaccataatcacccatccttggccaacttcgtgaatactaatcttggccggtcgtttgttggaggaaacaccatggatgttcaaggtcatggcacacatgttgctggcacgattgcatcttatgggagtgtaagcggagtgatgcagagtgcgacactgatcccggtcaaagtgctcgataattctggcagcgggtccctttacggtattacgcaaggcatattgtatgccgccgacatcgatgcggacgtcattaacatgtctctgggtggaggaggctataatcagagcatggatgaggctgttcaaacagcagttgctcagggaaccattgtagtagcagcgactggcaatgatggtgcatcgtcgatcagttatcctgctgcctacagcagcgtcattgcggtgggatctgtgacgtccaatcgtacacgatcctcgttttctaactatggatctgggcttgaagttatggcaccgggcagcaacatctacagtacgtatcctaatgacagatatacatctttgagtggtacaagcatggctactccgcacgttgcgggcgtagctgggctcattcgcgcagccaacccagacatatctgtcgcgcaagcccgtcagattctgcgggataccgcgcaagaagcaggatcgttcacacagtacggctatggaatcgtcgatgctcatgccgccgttgttgctgcatccggtggtagcggcggc

SEQ ID NO: 2166 - protein, 413 aa, synthetic construct
  REGION 1..413: note = Variant of serine peptidase from Bacillus sinesaloumensis
MADQASQANGNQDVIEGELIVSVEPKNGKPDVSIQSAQSVTGQEDVLKSKGFTIVDTLHVEDSSVKPLVSKNFNKKVVEKMGLVYLVQYSPDQFKSSNIAKKELRKELMDLGFKVRYISENYKMMAIEGTATLQAVHPNQNWHYNMIKAPEAWAITSGSSSVKVAVLDTGIDHNHPSLANFVNTNLGRSFVGGNTMDVQGHGTHVAGTIASYGSVSGVMQSATLIPVKVLDNSGSGSLYGITQGILYAADIDADVINMSLGGGGYNQSMDEAVQTAVAQGTIVVAATGNDGASSISYPAAYSSVIAVGSVTSNRTRSSFSNYGSGLEVMAPGSNIYSTYPNDRYTSLSGTSMATPHVAGVAGLIRAANPDISVAQARQILRDTAQEAGSFTQYGYGIVDAHAAVVAASGGSGG

SEQ ID NO: 2167 - DNA, 1239 bp, synthetic construct
  misc_feature 1..1239: note = Variant of serine peptidase from Bacillus sinesaloumensis
  source 1..1239: mol_type = other DNA
atggcagatcaagctagtcaagctaatggaaaccaggacgtcattgaaggcgagctgatcgtttcagtggaaccgaagaacggtaaacctgatgtgagcattcaaagtgcacaatccgtaacagggcaggaagacgtccttaaatcgaaaggctttacgatcgttgataccttgcatgtagaggatagcagcgtcaagccactcgtctcgaagaatttcaataagaaagtggtggagaagatgggactggtgtatcttgttcaatactctccggaccagtttaaaagttccaacattgcgaagaaagaactcagaaaagaattgatggatctgggctttaaagtccgctatataagcgaaaattacaagatgatggcgatcgaaggtacagccactcttcaggcagtacaccctaaccaaaactggcattataatatgattaaagctccggaagcgtgggctattacgtctggatcctctagcgttaaagtagcagtcctggatacagggatcgaccataatcacccatccttggccaacttcgtgaatactaatcttggccggtcgtttgttggaggaaacaccatggatgttcaaggtcatggcacacatgttgctggcacgattgcatcttatgggagtgtaagcggagtgatgcagagtgcgacactgatcccggtcaaagtgctcgataattctggcagcgggtccctttacggtattacgcaaggcatattgtatgccgccgacatcgatgcggacgtcattaacatgtctctgggtggaggaggctataatcagagcatggatgaggctgttcaaacagcagttgctcagggaaccattgtagtagcagcgactggcaatgatggtgcatcgtcgatcagttatcctgctgcctacagcagcgtcattgcggtgggatctgtgacgtccaatcgtacacgatcctcgttttctaactatggatctgggcttgaagttatggcaccgggcagcaacatctacagtacgtatcctaattacagatatacatctttgagtggtacaagcatggctactccgcacgttgcgggcgtagctgggctcattcgcgcagccaacccagacatatctgtcgcgcaagcccgtcagattctgcgggataccgcgcaagaagcaggatcgttcacacagtacggctatggaatcgtcgatgctcatgccgccgttgttgctgcatccggtggtagcggcggc

SEQ ID NO: 2168 - protein, 413 aa, synthetic construct
  REGION 1..413: note = Variant of serine peptidase from Bacillus sinesaloumensis
MADQASQANGNQDVIEGELIVSVEPKNGKPDVSIQSAQSVTGQEDVLKSKGFTIVDTLHVEDSSVKPLVSKNFNKKVVEKMGLVYLVQYSPDQFKSSNIAKKELRKELMDLGFKVRYISENYKMMAIEGTATLQAVHPNQNWHYNMIKAPEAWAITSGSSSVKVAVLDTGIDHNHPSLANFVNTNLGRSFVGGNTMDVQGHGTHVAGTIASYGSVSGVMQSATLIPVKVLDNSGSGSLYGITQGILYAADIDADVINMSLGGGGYNQSMDEAVQTAVAQGTIVVAATGNDGASSISYPAAYSSVIAVGSVTSNRTRSSFSNYGSGLEVMAPGSNIYSTYPNYRYTSLSGTSMATPHVAGVAGLIRAANPDISVAQARQILRDTAQEAGSFTQYGYGIVDAHAAVVAASGGSGG

SEQ ID NO: 2169 - DNA, 1239 bp, synthetic construct
  misc_feature 1..1239: note = Variant of serine peptidase from Bacillus sinesaloumensis
  source 1..1239: mol_type = other DNA
atggcagatcaagctagtcaagctaatggaaaccaggacgtcattgaaggcgagctgatcgtttcagtggaaccgaagaacggtaaacctgatgtgagcattcaaagtgcacaatccgtaacagggcaggaagacgtccttaaatcgaaaggctttacgatcgttgataccttgcatgtagaggatagcagcgtcaagccactcgtctcgaagaatttcaataagaaagtggtggagaagatgggactggtgtatcttgttcaatactctccggaccagtttaaaagttccaacattgcgaagaaagaactcagaaaagaattgatggatctgggctttaaagtccgctatataagcgaaaattacaagatgatggcgatcgaaggtacagccactcttcaggcagtacaccctaaccaaaactggcattataatatgattaaagctccggaagcgtgggctattacgtctggatcctctagcgttaaagtagcagtcctggatacagggatcgaccataatcacccatccttggccaacttcgtgaatactaatcttggccggtcgtttgttggaggaaacaccatggatgttcaaggtcatggcacacatgttgctggcacgattgcatcttatgggagtgtaagcggagtgatgcagagtgcgacactgatcccggtcaaagtgctcgataattctggcagcgggtccctttacggtattacgcaaggcatattgtatgccgccgacatcgatgcggacgtcattaacatgtctctgggtggaggaggctataatcagagcatggatgaggctgttcaaacagcagttgctcagggaaccattgtagtagcagcgactggcaatgatggtgcatcgtcgatcagttatcctgctgcctacagcagcgtcattgcggtgggatctgtgacgtccaatcgtacacgatcctcgttttctaactatggatctgggcttgaagttatggcaccgggcagcaacatctacagtacgtatcctaattccagatatgggtctttgagtggtacaagcatggctactccgcacgttgcgggcgtagctgggctcattcgcgcagccaacccagacatatctgtcgcgcaagcccgtcagattctgcgggataccgcgcaagaagcaggatcgttcacacagtacggctatggaatcgtcgatgctcatgccgccgttgttgctgcatccggtggtagcggcggc

SEQ ID NO: 2170 - protein, 413 aa, synthetic construct
  REGION 1..413: note = Variant of serine peptidase from Bacillus sinesaloumensis
MADQASQANGNQDVIEGELIVSVEPKNGKPDVSIQSAQSVTGQEDVLKSKGFTIVDTLHVEDSSVKPLVSKNFNKKVVEKMGLVYLVQYSPDQFKSSNIAKKELRKELMDLGFKVRYISENYKMMAIEGTATLQAVHPNQNWHYNMIKAPEAWAITSGSSSVKVAVLDTGIDHNHPSLANFVNTNLGRSFVGGNTMDVQGHGTHVAGTIASYGSVSGVMQSATLIPVKVLDNSGSGSLYGITQGILYAADIDADVINMSLGGGGYNQSMDEAVQTAVAQGTIVVAATGNDGASSISYPAAYSSVIAVGSVTSNRTRSSFSNYGSGLEVMAPGSNIYSTYPNSRYGSLSGTSMATPHVAGVAGLIRAANPDISVAQARQILRDTAQEAGSFTQYGYGIVDAHAAVVAASGGSGG

SEQ ID NO: 2171 - DNA, 1239 bp, synthetic construct
  misc_feature 1..1239: note = Variant of serine peptidase from Bacillus sinesaloumensis
  source 1..1239: mol_type = other DNA
atggcagatcaagctagtcaagctaatggaaaccaggacgtcattgaaggcgagctgatcgtttcagtggaaccgaagaacggtaaacctgatgtgagcattcaaagtgcacaatccgtaacagggcaggaagacgtccttaaatcgaaaggctttacgatcgttgataccttgcatgtagaggatagcagcgtcaagccactcgtctcgaagaatttcaataagaaagtggtggagaagatgggactggtgtatcttgttcaatactctccggaccagtttaaaagttccaacattgcgaagaaagaactcagaaaagaattgatggatctgggctttaaagtccgctatataagcgaaaattacaagatgatggcgatcgaaggtacagccactcttcaggcagtacaccctaaccaaaactggcattataatatgattaaagctccggaagcgtgggctattacgtctggatcctctagcgttaaagtagcagtcctggatacagggatcgaccataatcacccatccttggccaacttcgtgaatactaatcttggccggtcgtttgttggaggaaacaccatggatgttcaaggtcatggcacacatgttgctggcacgattgcatcttatgggagtgtaagcggagtgatgcagagtgcgacactgatcccggtcaaagtgctcgataattctggcagcgggtccctttacggtattacgcaaggcatattgtatgccgccgacatcgatgcggacgtcattaacatgtctctgggtggaggaggctataatcagagcatggatgaggctgttcaaacagcagttgctcagggaaccattgtagtagcagcgactggcaatgatggtgcatcgtcgatcagttatcctgctgcctacagcagcgtcattgcggtgggatctgtgacgtccaatcgtacacgatcctcgttttctaactatggatctgggcttgaagttatggcaccgggcagcaacatctacagtacgtatcctaattccagatataggtctttgagtggtacaagcatggctactccgcacgttgcgggcgtagctgggctcattcgcgcagccaacccagacatatctgtcgcgcaagcccgtcagattctgcgggataccgcgcaagaagcaggatcgttcacacagtacggctatggaatcgtcgatgctcatgccgccgttgttgctgcatccggtggtagcggcggc

SEQ ID NO: 2172 - protein, 413 aa, synthetic construct; identical to SEQ ID NO: 856
  REGION 1..413: note = Variant of serine peptidase from Bacillus sinesaloumensis

SEQ ID NO: 2173 - DNA, 1239 bp, synthetic construct
  misc_feature 1..1239: note = Variant of serine peptidase from Bacillus sinesaloumensis
  source 1..1239: mol_type = other DNA
atggcagatcaagctagtcaagctaatggaaaccaggacgtcattgaaggcgagctgatcgtttcagtggaaccgaagaacggtaaacctgatgtgagcattcaaagtgcacaatccgtaacagggcaggaagacgtccttaaatcgaaaggctttacgatcgttgataccttgcatgtagaggatagcagcgtcaagccactcgtctcgaagaatttcaataagaaagtggtggagaagatgggactggtgtatcttgttcaatactctccggaccagtttaaaagttccaacattgcgaagaaagaactcagaaaagaattgatggatctgggctttaaagtccgctatataagcgaaaattacaagatgatggcgatcgaaggtacagccactcttcaggcagtacaccctaaccaaaactggcattataatatgattaaagctccggaagcgtgggctattacgtctggatcctctagcgttaaagtagcagtcctggatacagggatcgaccataatcacccatccttggccaacttcgtgaatactaatcttggccggtcgtttgttggaggaaacaccatggatgttcaaggtcatggcacacatgttgctggcacgattgcatcttatgggagtgtaagcggagtgatgcagagtgcgacactgatcccggtcaaagtgctcgataattctggcagcgggtccctttacggtattacgcaaggcatattgtatgccgccgacatcgatgcggacgtcattaacatgtctctgggtggaggaggctataatcagagcatggatgaggctgttcaaacagcagttgctcagggaaccattgtagtagcagcgactggcaatgatggtgcatcgtcgatcagttatcctgctgcctacagcagcgtcattgcggtgggatctgtgacgtccaatcgtacacgatcctcgttttctaactatggatctgggcttgaagttatggcaccgggcagcaacatctacagtacgtatcctaattccagatatctttctttgagtggtacaagcatggctactccgcacgttgcgggcgtagctgggctcattcgcgcagccaacccagacatatctgtcgcgcaagcccgtcagattctgcgggataccgcgcaagaagcaggatcgttcacacagtacggctatggaatcgtcgatgctcatgccgccgttgttgctgcatccggtggtagcggcggc

SEQ ID NO: 2174 - protein, 413 aa, synthetic construct
  REGION 1..413: note = Variant of serine peptidase from Bacillus sinesaloumensis
MADQASQANGNQDVIEGELIVSVEPKNGKPDVSIQSAQSVTGQEDVLKSKGFTIVDTLHVEDSSVKPLVSKNFNKKVVEKMGLVYLVQYSPDQFKSSNIAKKELRKELMDLGFKVRYISENYKMMAIEGTATLQAVHPNQNWHYNMIKAPEAWAITSGSSSVKVAVLDTGIDHNHPSLANFVNTNLGRSFVGGNTMDVQGHGTHVAGTIASYGSVSGVMQSATLIPVKVLDNSGSGSLYGITQGILYAADIDADVINMSLGGGGYNQSMDEAVQTAVAQGTIVVAATGNDGASSISYPAAYSSVIAVGSVTSNRTRSSFSNYGSGLEVMAPGSNIYSTYPNSRYLSLSGTSMATPHVAGVAGLIRAANPDISVAQARQILRDTAQEAGSFTQYGYGIVDAHAAVVAASGGSGG

SEQ ID NO: 2175 - DNA, 1239 bp, synthetic construct
  misc_feature 1..1239: note = Variant of serine peptidase from Bacillus sinesaloumensis
  source 1..1239: mol_type = other DNA
atggcagatcaagctagtcaagctaatggaaaccaggacgtcattgaaggcgagctgatcgtttcagtggaaccgaagaacggtaaacctgatgtgagcattcaaagtgcacaatccgtaacagggcaggaagacgtccttaaatcgaaaggctttacgatcgttgataccttgcatgtagaggatagcagcgtcaagccactcgtctcgaagaatttcaataagaaagtggtggagaagatgggactggtgtatcttgttcaatactctccggaccagtttaaaagttccaacattgcgaagaaagaactcagaaaagaattgatggatctgggctttaaagtccgctatataagcgaaaattacaagatgatggcgatcgaaggtacagccactcttcaggcagtacaccctaaccaaaactggcattataatatgattaaagctccggaagcgtgggctattacgtctggatcctctagcgttaaagtagcagtcctggatacagggatcgaccataatcacccatccttggccaacttcgtgaatactaatcttggccggtcgtttgttggaggaaacaccatggatgttcaaggtcatggcacacatgttgctggcacgattgcatcttatgggagtgtaagcggagtgatgcagagtgcgacactgatcccggtcaaagtgctcgataattctggcagcgggtccctttacggtattacgcaaggcatattgtatgccgccgacatcgatgcggacgtcattaacatgtctctgggtggaggaggctataatcagagcatggatgaggctgttcaaacagcagttgctcagggaaccattgtagtagcagcgactggcaatgatggtgcatcgtcgatcagttatcctgctgcctacagcagcgtcattgcggtgggatctgtgacgtccaatcgtacacgatcctcgttttctaactatggatctgggcttgaagttatggcaccgggcagcaacatctacagtacgtatcctaattccagatatgtgtctttgagtggtacaagcatggctactccgcacgttgcgggcgtagctgggctcattcgcgcagccaacccagacatatctgtcgcgcaagcccgtcagattctgcgggataccgcgcaagaagcaggatcgttcacacagtacggctatggaatcgtcgatgctcatgccgccgttgttgctgcatccggtggtagcggcggc

SEQ ID NO: 2176 - protein, 413 aa, synthetic construct
  REGION 1..413: note = Variant of serine peptidase from Bacillus sinesaloumensis
MADQASQANGNQDVIEGELIVSVEPKNGKPDVSIQSAQSVTGQEDVLKSKGFTIVDTLHVEDSSVKPLVSKNFNKKVVEKMGLVYLVQYSPDQFKSSNIAKKELRKELMDLGFKVRYISENYKMMAIEGTATLQAVHPNQNWHYNMIKAPEAWAITSGSSSVKVAVLDTGIDHNHPSLANFVNTNLGRSFVGGNTMDVQGHGTHVAGTIASYGSVSGVMQSATLIPVKVLDNSGSGSLYGITQGILYAADIDADVINMSLGGGGYNQSMDEAVQTAVAQGTIVVAATGNDGASSISYPAAYSSVIAVGSVTSNRTRSSFSNYGSGLEVMAPGSNIYSTYPNSRYVSLSGTSMATPHVAGVAGLIRAANPDISVAQARQILRDTAQEAGSFTQYGYGIVDAHAAVVAASGGSGG

SEQ ID NO: 2177 - DNA, 1239 bp, synthetic construct
  misc_feature 1..1239: note = Variant of serine peptidase from Bacillus sinesaloumensis
  source 1..1239: mol_type = other DNA
atggcagatcaagctagtcaagctaatggaaaccaggacgtcattgaaggcgagctgatcgtttcagtggaaccgaagaacggtaaacctgatgtgagcattcaaagtgcacaatccgtaacagggcaggaagacgtccttaaatcgaaaggctttacgatcgttgataccttgcatgtagaggatagcagcgtcaagccactcgtctcgaagaatttcaataagaaagtggtggagaagatgggactggtgtatcttgttcaatactctccggaccagtttaaaagttccaacattgcgaagaaagaactcagaaaagaattgatggatctgggctttaaagtccgctatataagcgaaaattacaagatgatggcgatcgaaggtacagccactcttcaggcagtacaccctaaccaaaactggcattataatatgattaaagctccggaagcgtgggctattacgtctggatcctctagcgttaaagtagcagtcctggatacagggatcgaccataatcacccatccttggccaacttcgtgaatactaatcttggccggtcgtttgttggaggaaacaccatggatgttcaaggtcatggcacacatgttgctggcacgattgcatcttatgggagtgtaagcggagtgatgcagagtgcgacactgatcccggtcaaagtgctcgataattctggcagcgggtccctttacggtattacgcaaggcatattgtatgccgccgacatcgatgcggacgtcattaacatgtctctgggtggaggaggctataatcagagcatggatgaggctgttcaaacagcagttgctcagggaaccattgtagtagcagcgactggcaatgatggtgcatcgtcgatcagttatcctgctgcctacagcagcgtcattgcggtgggatctgtgacgtccaatcgtacacgatcctcgttttctaactatggatctgggcttgaagttatggcaccgggcagcaacatctacagtacgtatcctaattccagatatgcgtctttgagtggtacaagcatggctactccgcacgttgcgggcgtagctgggctcattcgcgcagccaacccagacatatctgtcgcgcaagcccgtcagattctgcgggataccgcgcaagaagcaggatcgttcacacagtacggctatggaatcgtcgatgctcatgccgccgttgttgctgcatccggtggtagcggcggc

SEQ ID NO: 2178 - protein, 413 aa, synthetic construct
  REGION 1..413: note = Variant of serine peptidase from Bacillus sinesaloumensis
MADQASQANGNQDVIEGELIVSVEPKNGKPDVSIQSAQSVTGQEDVLKSKGFTIVDTLHVEDSSVKPLVSKNFNKKVVEKMGLVYLVQYSPDQFKSSNIAKKELRKELMDLGFKVRYISENYKMMAIEGTATLQAVHPNQNWHYNMIKAPEAWAITSGSSSVKVAVLDTGIDHNHPSLANFVNTNLGRSFVGGNTMDVQGHGTHVAGTIASYGSVSGVMQSATLIPVKVLDNSGSGSLYGITQGILYAADIDADVINMSLGGGGYNQSMDEAVQTAVAQGTIVVAATGNDGASSISYPAAYSSVIAVGSVTSNRTRSSFSNYGSGLEVMAPGSNIYSTYPNSRYASLSGTSMATPHVAGVAGLIRAANPDISVAQARQILRDTAQEAGSFTQYGYGIVDAHAAVVAASGGSGG

SEQ ID NO: 2179 - DNA, 1239 bp, synthetic construct
  misc_feature 1..1239: note = Variant of serine peptidase from Bacillus sinesaloumensis
  source 1..1239: mol_type = other DNA
atggcagatcaagctagtcaagctaatggaaaccaggacgtcattgaaggcgagctgatcgtttcagtggaaccgaagaacggtaaacctgatgtgagcattcaaagtgcacaatccgtaacagggcaggaagacgtccttaaatcgaaaggctttacgatcgttgataccttgcatgtagaggatagcagcgtcaagccactcgtctcgaagaatttcaataagaaagtggtggagaagatgggactggtgtatcttgttcaatactctccggaccagtttaaaagttccaacattgcgaagaaagaactcagaaaagaattgatggatctgggctttaaagtccgctatataagcgaaaattacaagatgatggcgatcgaaggtacagccactcttcaggcagtacaccctaaccaaaactggcattataatatgattaaagctccggaagcgtgggctattacgtctggatcctctagcgttaaagtagcagtcctggatacagggatcgaccataatcacccatccttggccaacttcgtgaatactaatcttggccggtcgtttgttggaggaaacaccatggatgttcaaggtcatggcacacatgttgctggcacgattgcatcttatgggagtgtaagcggagtgatgcagagtgcgacactgatcccggtcaaagtgctcgataattctggcagcgggtccctttacggtattacgcaaggcatattgtatgccgccgacatcgatgcggacgtcattaacatgtctctgggtggaggaggctataatcagagcatggatgaggctgttcaaacagcagttgctcagggaaccattgtagtagcagcgactggcaatgatggtgcatcgtcgatcagttatcctgctgcctacagcagcgtcattgcggtgggatctgtgacgtccaatcgtacacgatcctcgttttctaactatggatctgggcttgaagttatggcaccgggcagcaacatctacagtacgtatcctaattccagatatatgtctttgagtggtacaagcatggctactccgcacgttgcgggcgtagctgggctcattcgcgcagccaacccagacatatctgtcgcgcaagcccgtcagattctgcgggataccgcgcaagaagcaggatcgttcacacagtacggctatggaatcgtcgatgctcatgccgccgttgttgctgcatccggtggtagcggcggc

SEQ ID NO: 2180 - protein, 413 aa, synthetic construct
  REGION 1..413: note = Variant of serine peptidase from Bacillus sinesaloumensis
MADQASQANGNQDVIEGELIVSVEPKNGKPDVSIQSAQSVTGQEDVLKSKGFTIVDTLHVEDSSVKPLVSKNFNKKVVEKMGLVYLVQYSPDQFKSSNIAKKELRKELMDLGFKVRYISENYKMMAIEGTATLQAVHPNQNWHYNMIKAPEAWAITSGSSSVKVAVLDTGIDHNHPSLANFVNTNLGRSFVGGNTMDVQGHGTHVAGTIASYGSVSGVMQSATLIPVKVLDNSGSGSLYGITQGILYAADIDADVINMSLGGGGYNQSMDEAVQTAVAQGTIVVAATGNDGASSISYPAAYSSVIAVGSVTSNRTRSSFSNYGSGLEVMAPGSNIYSTYPNSRYMSLSGTSMATPHVAGVAGLIRAANPDISVAQARQILRDTAQEAGSFTQYGYGIVDAHAAVVAASGGSGG

SEQ ID NO: 2181 - DNA, 1239 bp, synthetic construct
  misc_feature 1..1239: note = Variant of serine peptidase from Bacillus sinesaloumensis
  source 1..1239: mol_type = other DNA
atggcagatcaagctagtcaagctaatggaaaccaggacgtcattgaaggcgagctgatcgtttcagtggaaccgaagaacggtaaacctgatgtgagcattcaaagtgcacaatccgtaacagggcaggaagacgtccttaaatcgaaaggctttacgatcgttgataccttgcatgtagaggatagcagcgtcaagccactcgtctcgaagaatttcaataagaaagtggtggagaagatgggactggtgtatcttgttcaatactctccggaccagtttaaaagttccaacattgcgaagaaagaactcagaaaagaattgatggatctgggctttaaagtccgctatataagcgaaaattacaagatgatggcgatcgaaggtacagccactcttcaggcagtacaccctaaccaaaactggcattataatatgattaaagctccggaagcgtgggctattacgtctggatcctctagcgttaaagtagcagtcctggatacagggatcgaccataatcacccatccttggccaacttcgtgaatactaatcttggccggtcgtttgttggaggaaacaccatggatgttcaaggtcatggcacacatgttgctggcacgattgcatcttatgggagtgtaagcggagtgatgcagagtgcgacactgatcccggtcaaagtgctcgataattctggcagcgggtccctttacggtattacgcaaggcatattgtatgccgccgacatcgatgcggacgtcattaacatgtctctgggtggaggaggctataatcagagcatggatgaggctgttcaaacagcagttgctcagggaaccattgtagtagcagcgactggcaatgatggtgcatcgtcgatcagttatcctgctgcctacagcagcgtcattgcggtgggatctgtgacgtccaatcgtacacgatcctcgttttctaactatggatctgggcttgaagttatggcaccgggcagcaacatctacagtacgtatcctaattccagatattggtctttgagtggtacaagcatggctactccgcacgttgcgggcgtagctgggctcattcgcgcagccaacccagacatatctgtcgcgcaagcccgtcagattctgcgggataccgcgcaagaagcaggatcgttcacacagtacggctatggaatcgtcgatgctcatgccgccgttgttgctgcatccggtggtagcggcggc

SEQ ID NO: 2182 - protein, 413 aa, synthetic construct
  REGION 1..413: note = Variant of serine peptidase from Bacillus sinesaloumensis
MADQASQANGNQDVIEGELIVSVEPKNGKPDVSIQSAQSVTGQEDVLKSKGFTIVDTLHVEDSSVKPLVSKNFNKKVVEKMGLVYLVQYSPDQFKSSNIAKKELRKELMDLGFKVRYISENYKMMAIEGTATLQAVHPNQNWHYNMIKAPEAWAITSGSSSVKVAVLDTGIDHNHPSLANFVNTNLGRSFVGGNTMDVQGHGTHVAGTIASYGSVSGVMQSATLIPVKVLDNSGSGSLYGITQGILYAADIDADVINMSLGGGGYNQSMDEAVQTAVAQGTIVVAATGNDGASSISYPAAYSSVIAVGSVTSNRTRSSFSNYGSGLEVMAPGSNIYSTYPNSRYWSLSGTSMATPHVAGVAGLIRAANPDISVAQARQILRDTAQEAGSFTQYGYGIVDAHAAVVAASGGSGG

SEQ ID NO: 2183 - DNA, 1239 bp, synthetic construct; identical to SEQ ID NO: 731
  misc_feature 1..1239: note = Variant of serine peptidase from Bacillus sinesaloumensis
  source 1..1239: mol_type = other DNA

SEQ ID NO: 2184 - protein, 413 aa, synthetic construct; identical to SEQ ID NO: 732
  REGION 1..413: note = Variant of serine peptidase from Bacillus sinesaloumensis

SEQ ID NO: 2185 - DNA, 1239 bp, synthetic construct
  misc_feature 1..1239: note = Variant of serine peptidase from Bacillus sinesaloumensis
  source 1..1239: mol_type = other DNA
atggcagatcaagctagtcaagctaatggaaaccaggacgtcattgaaggcgagctgatcgtttcagtggaaccgaagaacggtaaacctgatgtgagcattcaaagtgcacaatccgtaacagggcaggaagacgtccttaaatcgaaaggctttacgatcgttgataccttgcatgtagaggatagcagcgtcaagccactcgtctcgaagaatttcaataagaaagtggtggagaagatgggactggtgtatcttgttcaatactctccggaccagtttaaaagttccaacattgcgaagaaagaactcagaaaagaattgatggatctgggctttaaagtccgctatataagcgaaaattacaagatgatggcgatcgaaggtacagccactcttcaggcagtacaccctaaccaaaactggcattataatatgattaaagctccggaagcgtgggctattacgtctggatcctctagcgttaaagtagcagtcctggatacagggatcgaccataatcacccatccttggccaacttcgtgaatactaatcttggccggtcgtttgttggaggaaacaccatggatgttcaaggtcatggcacacatgttgctggcacgattgcatcttatgggagtgtaagcggagtgatgcagagtgcgacactgatcccggtcaaagtgctcgataattctggcagcgggtccctttacggtattacgcaaggcatattgtatgccgccgacatcgatgcggacgtcattaacatgtctctgggtggaggaggctataatcagagcatggatgaggctgttcaaacagcagttgctcagggaaccattgtagtagcagcgactggcaatgatggtgcatcgtcgatcagttatcctgctgcctacagcagcgtcattgcggtgggatctgtgacgtccaatcgtacacgatcctcgttttctaactatggatctgggcttgaagttatggcaccgggcagcaacatctacagtacgtatcctaattccagatatagttctttgagtggtacaagcatggctactccgcacgttgcgggcgtagctgggctcattcgcgcagccaacccagacatatctgtcgcgcaagcccgtcagattctgcgggataccgcgcaagaagcaggatcgttcacacagtacggctatggaatcgtcgatgctcatgccgccgttgttgctgcatccggtggtagcggcggc

SEQ ID NO: 2186 - protein, 413 aa, synthetic construct
  REGION 1..413: note = Variant of serine peptidase from Bacillus sinesaloumensis
MADQASQANGNQDVIEGELIVSVEPKNGKPDVSIQSAQSVTGQEDVLKSKGFTIVDTLHVEDSSVKPLVSKNFNKKVVEKMGLVYLVQYSPDQFKSSNIAKKELRKELMDLGFKVRYISENYKMMAIEGTATLQAVHPNQNWHYNMIKAPEAWAITSGSSSVKVAVLDTGIDHNHPSLANFVNTNLGRSFVGGNTMDVQGHGTHVAGTIASYGSVSGVMQSATLIPVKVLDNSGSGSLYGITQGILYAADIDADVINMSLGGGGYNQSMDEAVQTAVAQGTIVVAATGNDGASSISYPAAYSSVIAVGSVTSNRTRSSFSNYGSGLEVMAPGSNIYSTYPNSRYSSLSGTSMATPHVAGVAGLIRAANPDISVAQARQILRDTAQEAGSFTQYGYGIVDAHAAVVAASGGSGG

SEQ ID NO: 2187 - DNA, 1239 bp, synthetic construct
  misc_feature 1..1239: note = Variant of serine peptidase from Bacillus sinesaloumensis
  source 1..1239: mol_type = other DNA
atggcagatcaagctagtcaagctaatggaaaccaggacgtcattgaaggcgagctgatcgtttcagtggaaccgaagaacggtaaacctgatgtgagcattcaaagtgcacaatccgtaacagggcaggaagacgtccttaaatcgaaaggctttacgatcgttgataccttgcatgtagaggatagcagcgtcaagccactcgtctcgaagaatttcaataagaaagtggtggagaagatgggactggtgtatcttgttcaatactctccggaccagtttaaaagttccaacattgcgaagaaagaactcagaaaagaattgatggatctgggctttaaagtccgctatataagcgaaaattacaagatgatggcgatcgaaggtacagccactcttcaggcagtacaccctaaccaaaactggcattataatatgattaaagctccggaagcgtgggctattacgtctggatcctctagcgttaaagtagcagtcctggatacagggatcgaccataatcacccatccttggccaacttcgtgaatactaatcttggccggtcgtttgttggaggaaacaccatggatgttcaaggtcatggcacacatgttgctggcacgattgcatcttatgggagtgtaagcggagtgatgcagagtgcgacactgatcccggtcaaagtgctcgataattctggcagcgggtccctttacggtattacgcaaggcatattgtatgccgccgacatcgatgcggacgtcattaacatgtctctgggtggaggaggctataatcagagcatggatgaggctgttcaaacagcagttgctcagggaaccattgtagtagcagcgactggcaatgatggtgcatcgtcgatcagttatcctgctgcctacagcagcgtcattgcggtgggatctgtgacgtccaatcgtacacgatcctcgttttctaactatggatctgggcttgaagttatggcaccgggcagcaacatctacagtacgtatcctaattccagatatgagtctttgagtggtacaagcatggctactccgcacgttgcgggcgtagctgggctcattcgcgcagccaacccagacatatctgtcgcgcaagcccgtcagattctgcgggataccgcgcaagaagcaggatcgttcacacagtacggctatggaatcgtcgatgctcatgccgccgttgttgctgcatccggtggtagcggcggc

SEQ ID NO: 2188 - protein, 413 aa, synthetic construct
  REGION 1..413: note = Variant of serine peptidase from Bacillus sinesaloumensis
MADQASQANGNQDVIEGELIVSVEPKNGKPDVSIQSAQSVTGQEDVLKSKGFTIVDTLHVEDSSVKPLVSKNFNKKVVEKMGLVYLVQYSPDQFKSSNIAKKELRKELMDLGFKVRYISENYKMMAIEGTATLQAVHPNQNWHYNMIKAPEAWAITSGSSSVKVAVLDTGIDHNHPSLANFVNTNLGRSFVGGNTMDVQGHGTHVAGTIASYGSVSGVMQSATLIPVKVLDNSGSGSLYGITQGILYAADIDADVINMSLGGGGYNQSMDEAVQTAVAQGTIVVAATGNDGASSISYPAAYSSVIAVGSVTSNRTRSSFSNYGSGLEVMAPGSNIYSTYPNSRYESLSGTSMATPHVAGVAGLIRAANPDISVAQARQILRDTAQEAGSFTQYGYGIVDAHAAVVAASGGSGG

SEQ ID NO: 2189 - DNA, 1239 bp, synthetic construct
  misc_feature 1..1239: note = Variant of serine peptidase from Bacillus sinesaloumensis
  source 1..1239: mol_type = other DNA
atggcagatcaagctagtcaagctaatggaaaccaggacgtcattgaaggcgagctgatcgtttcagtggaaccgaagaacggtaaacctgatgtgagcattcaaagtgcacaatccgtaacagggcaggaagacgtccttaaatcgaaaggctttacgatcgttgataccttgcatgtagaggatagcagcgtcaagccactcgtctcgaagaatttcaataagaaagtggtggagaagatgggactggtgtatcttgttcaatactctccggaccagtttaaaagttccaacattgcgaagaaagaactcagaaaagaattgatggatctgggctttaaagtccgctatataagcgaaaattacaagatgatggcgatcgaaggtacagccactcttcaggcagtacaccctaaccaaaactggcattataatatgattaaagctccggaagcgtgggctattacgtctggatcctctagcgttaaagtagcagtcctggatacagggatcgaccataatcacccatccttggccaacttcgtgaatactaatcttggccggtcgtttgttggaggaaacaccatggatgttcaaggtcatggcacacatgttgctggcacgattgcatcttatgggagtgtaagcggagtgatgcagagtgcgacactgatcccggtcaaagtgctcgataattctggcagcgggtccctttacggtattacgcaaggcatattgtatgccgccgacatcgatgcggacgtcattaacatgtctctgggtggaggaggctataatcagagcatggatgaggctgttcaaacagcagttgctcagggaaccattgtagtagcagcgactggcaatgatggtgcatcgtcgatcagttatcctgctgcctacagcagcgtcattgcggtgggatctgtgacgtccaatcgtacacgatcctcgttttctaactatggatctgggcttgaagttatggcaccgggcagcaacatctacagtacgtatcctaattccagatattactctttgagtggtacaagcatggctactccgcacgttgcgggcgtagctgggctcattcgcgcagccaacccagacatatctgtcgcgcaagcccgtcagattctgcgggataccgcgcaagaagcaggatcgttcacacagtacggctatggaatcgtcgatgctcatgccgccgttgttgctgcatccggtggtagcggcggc

SEQ ID NO: 2190 - protein, 413 aa, synthetic construct
  REGION 1..413: note = Variant of serine peptidase from Bacillus sinesaloumensis
MADQASQANGNQDVIEGELIVSVEPKNGKPDVSIQSAQSVTGQEDVLKSKGFTIVDTLHVEDSSVKPLVSKNFNKKVVEKMGLVYLVQYSPDQFKSSNIAKKELRKELMDLGFKVRYISENYKMMAIEGTATLQAVHPNQNWHYNMIKAPEAWAITSGSSSVKVAVLDTGIDHNHPSLANFVNTNLGRSFVGGNTMDVQGHGTHVAGTIASYGSVSGVMQSATLIPVKVLDNSGSGSLYGITQGILYAADIDADVINMSLGGGGYNQSMDEAVQTAVAQGTIVVAATGNDGASSISYPAAYSSVIAVGSVTSNRTRSSFSNYGSGLEVMAPGSNIYSTYPNSRYYSLSGTSMATPHVAGVAGLIRAANPDISVAQARQILRDTAQEAGSFTQYGYGIVDAHAAVVAASGGSGG

SEQ ID NO: 2191 - DNA, 1239 bp, synthetic construct
  misc_feature 1..1239: note = Variant of serine peptidase from Bacillus sinesaloumensis
  source 1..1239: mol_type = other DNA
atggcagatcaagctagtcaagctaatggaaaccaggacgtcattgaaggcgagctgatcgtttcagtggaaccgaagaacggtaaacctgatgtgagcattcaaagtgcacaatccgtaacagggcaggaagacgtccttaaatcgaaaggctttacgatcgttgataccttgcatgtagaggatagcagcgtcaagccactcgtctcgaagaatttcaataagaaagtggtggagaagatgggactggtgtatcttgttcaatactctccggaccagtttaaaagttccaacattgcgaagaaagaactcagaaaagaattgatggatctgggctttaaagtccgctatataagcgaaaattacaagatgatggcgatcgaaggtacagccactcttcaggcagtacaccctaaccaaaactggcattataatatgattaaagctccggaagcgtgggctattacgtctggatcctctagcgttaaagtagcagtcctggatacagggatcgaccataatcacccatccttggccaacttcgtgaatactaatcttggccggtcgtttgttggaggaaacaccatggatgttcaaggtcatggcacacatgttgctggcacgattgcatcttatgggagtgtaagcggagtgatgcagagtgcgacactgatcccggtcaaagtgctcgataattctggcagcgggtccctttacggtattacgcaaggcatattgtatgccgccgacatcgatgcggacgtcattaacatgtctctgggtggaggaggctataatcagagcatggatgaggctgttcaaacagcagttgctcagggaaccattgtagtagcagcgactggcaatgatggtgcatcgtcgatcagttatcctgctgcctacagcagcgtcattgcggtgggatctgtgacgtccaatcgtacacgatcctcgttttctaactatggatctgggcttgaagttatggcaccgggcagcaacatctacagtacgtatcctaattccagatatgactctttgagtggtacaagcatggctactccgcacgttgcgggcgtagctgggctcattcgcgcagccaacccagacatatctgtcgcgcaagcccgtcagattctgcgggataccgcgcaagaagcaggatcgttcacacagtacggctatggaatcgtcgatgctcatgccgccgttgttgctgcatccggtggtagcggcggc

SEQ ID NO: 2192 - protein, 413 aa, synthetic construct
  REGION 1..413: note = Variant of serine peptidase from Bacillus sinesaloumensis
MADQASQANGNQDVIEGELIVSVEPKNGKPDVSIQSAQSVTGQEDVLKSKGFTIVDTLHVEDSSVKPLVSKNFNKKVVEKMGLVYLVQYSPDQFKSSNIAKKELRKELMDLGFKVRYISENYKMMAIEGTATLQAVHPNQNWHYNMIKAPEAWAITSGSSSVKVAVLDTGIDHNHPSLANFVNTNLGRSFVGGNTMDVQGHGTHVAGTIASYGSVSGVMQSATLIPVKVLDNSGSGSLYGITQGILYAADIDADVINMSLGGGGYNQSMDEAVQTAVAQGTIVVAATGNDGASSISYPAAYSSVIAVGSVTSNRTRSSFSNYGSGLEVMAPGSNIYSTYPNSRYDSLSGTSMATPHVAGVAGLIRAANPDISVAQARQILRDTAQEAGSFTQYGYGIVDAHAAVVAASGGSGG

SEQ ID NO: 2193 - DNA, 1239 bp, synthetic construct
  misc_feature 1..1239: note = Variant of serine peptidase from Bacillus sinesaloumensis
  source 1..1239: mol_type = other DNA
atggcagatcaagctagtcaagctaatggaaaccaggacgtcattgaaggcgagctgatcgtttcagtggaaccgaagaacggtaaacctgatgtgagcattcaaagtgcacaatccgtaacagggcaggaagacgtccttaaatcgaaaggctttacgatcgttgataccttgcatgtagaggatagcagcgtcaagccactcgtctcgaagaatttcaataagaaagtggtggagaagatgggactggtgtatcttgttcaatactctccggaccagtttaaaagttccaacattgcgaagaaagaactcagaaaagaattgatggatctgggctttaaagtccgctatataagcgaaaattacaagatgatggcgatcgaaggtacagccactcttcaggcagtacaccctaaccaaaactggcattataatatgattaaagctccggaagcgtgggctattacgtctggatcctctagcgttaaagtagcagtcctggatacagggatcgaccataatcacccatccttggccaacttcgtgaatactaatcttggccggtcgtttgttggaggaaacaccatggatgttcaaggtcatggcacacatgttgctggcacgattgcatcttatgggagtgtaagcggagtgatgcagagtgcgacactgatcccggtcaaagtgctcgataattctggcagcgggtccctttacggtattacgcaaggcatattgtatgccgccgacatcgatgcggacgtcattaacatgtctctgggtggaggaggctataatcagagcatggatgaggctgttcaaacagcagttgctcagggaaccattgtagtagcagcgactggcaatgatggtgcatcgtcgatcagttatcctgctgcctacagcagcgtcattgcggtgggatctgtgacgtccaatcgtacacgatcctcgttttctaactatggatctgggcttgaagttatggcaccgggcagcaacatctacagtacgtatcctaattccagatatcagtctttgagtggtacaagcatggctactccgcacgttgcgggcgtagctgggctcattcgcgcagccaacccagacatatctgtcgcgcaagcccgtcagattctgcgggataccgcgcaagaagcaggatcgttcacacagtacggctatggaatcgtcgatgctcatgccgccgttgttgctgcatccggtggtagcggcggc

SEQ ID NO: 2194 - protein, 413 aa, synthetic construct
  REGION 1..413: note = Variant of serine peptidase from Bacillus sinesaloumensis
MADQASQANGNQDVIEGELIVSVEPKNGKPDVSIQSAQSVTGQEDVLKSKGFTIVDTLHVEDSSVKPLVSKNFNKKVVEKMGLVYLVQYSPDQFKSSNIAKKELRKELMDLGFKVRYISENYKMMAIEGTATLQAVHPNQNWHYNMIKAPEAWAITSGSSSVKVAVLDTGIDHNHPSLANFVNTNLGRSFVGGNTMDVQGHGTHVAGTIASYGSVSGVMQSATLIPVKVLDNSGSGSLYGITQGILYAADIDADVINMSLGGGGYNQSMDEAVQTAVAQGTIVVAATGNDGASSISYPAAYSSVIAVGSVTSNRTRSSFSNYGSGLEVMAPGSNIYSTYPNSRYQSLSGTSMATPHVAGVAGLIRAANPDISVAQARQILRDTAQEAGSFTQYGYGIVDAHAAVVAASGGSGG

SEQ ID NO: 2195 - DNA, 1239 bp, synthetic construct
  misc_feature 1..1239: note = Variant of serine peptidase from Bacillus sinesaloumensis
  source 1..1239: mol_type = other DNA
atggcagatcaagctagtcaagctaatggaaaccaggacgtcattgaaggcgagctgatcgtttcagtggaaccgaagaacggtaaacctgatgtgagcattcaaagtgcacaatccgtaacagggcaggaagacgtccttaaatcgaaaggctttacgatcgttgataccttgcatgtagaggatagcagcgtcaagccactcgtctcgaagaatttcaataagaaagtggtggagaagatgggactggtgtatcttgttcaatactctccggaccagtttaaaagttccaacattgcgaagaaagaactcagaaaagaattgatggatctgggctttaaagtccgctatataagcgaaaattacaagatgatggcgatcgaaggtacagccactcttcaggcagtacaccctaaccaaaactggcattataatatgattaaagctccggaagcgtgggctattacgtctggatcctctagcgttaaagtagcagtcctggatacagggatcgaccataatcacccatccttggccaacttcgtgaatactaatcttggccggtcgtttgttggaggaaacaccatggatgttcaaggtcatggcacacatgttgctggcacgattgcatcttatgggagtgtaagcggagtgatgcagagtgcgacactgatcccggtcaaagtgctcgataattctggcagcgggtccctttacggtattacgcaaggcatattgtatgccgccgacatcgatgcggacgtcattaacatgtctctgggtggaggaggctataatcagagcatggatgaggctgttcaaacagcagttgctcagggaaccattgtagtagcagcgactggcaatgatggtgcatcgtcgatcagttatcctgctgcctacagcagcgtcattgcggtgggatctgtgacgtccaatcgtacacgatcctcgttttctaactatggatctgggcttgaagttatggcaccgggcagcaacatctacagtacgtatcctaattccagatatttttctttgagtggtacaagcatggctactccgcacgttgcgggcgtagctgggctcattcgcgcagccaacccagacatatctgtcgcgcaagcccgtcagattctgcgggataccgcgcaagaagcaggatcgttcacacagtacggctatggaatcgtcgatgctcatgccgccgttgttgctgcatccggtggtagcggcggc

SEQ ID NO: 2196 - protein, 413 aa, synthetic construct
  REGION 1..413: note = Variant of serine peptidase from Bacillus sinesaloumensis
MADQASQANGNQDVIEGELIVSVEPKNGKPDVSIQSAQSVTGQEDVLKSKGFTIVDTLHVEDSSVKPLVSKNFNKKVVEKMGLVYLVQYSPDQFKSSNIAKKELRKELMDLGFKVRYISENYKMMAIEGTATLQAVHPNQNWHYNMIKAPEAWAITSGSSSVKVAVLDTGIDHNHPSLANFVNTNLGRSFVGGNTMDVQGHGTHVAGTIASYGSVSGVMQSATLIPVKVLDNSGSGSLYGITQGILYAADIDADVINMSLGGGGYNQSMDEAVQTAVAQGTIVVAATGNDGASSISYPAAYSSVIAVGSVTSNRTRSSFSNYGSGLEVMAPGSNIYSTYPNSRYFSLSGTSMATPHVAGVAGLIRAANPDISVAQARQILRDTAQEAGSFTQYGYGIVDAHAAVVAASGGSGG

SEQ ID NO: 2197 - DNA, 1239 bp, synthetic construct
  misc_feature 1..1239: note = Variant of serine peptidase from Bacillus sinesaloumensis
  source 1..1239: mol_type = other DNA
atggcagatcaagctagtcaagctaatggaaaccaggacgtcattgaaggcgagctgatcgtttcagtggaaccgaagaacggtaaacctgatgtgagcattcaaagtgcacaatccgtaacagggcaggaagacgtccttaaatcgaaaggctttacgatcgttgataccttgcatgtagaggatagcagcgtcaagccactcgtctcgaagaatttcaataagaaagtggtggagaagatgggactggtgtatcttgttcaatactctccggaccagtttaaaagttccaacattgcgaagaaagaactcagaaaagaattgatggatctgggctttaaagtccgctatataagcgaaaattacaagatgatggcgatcgaaggtacagccactcttcaggcagtacaccctaaccaaaactggcattataatatgattaaagctccggaagcgtgggctattacgtctggatcctctagcgttaaagtagcagtcctggatacagggatcgaccataatcacccatccttggccaacttcgtgaatactaatcttggccggtcgtttgttggaggaaacaccatggatgttcaaggtcatggcacacatgttgctggcacgattgcatcttatgggagtgtaagcggagtgatgcagagtgcgacactgatcccggtcaaagtgctcgataattctggcagcgggtccctttacggtattacgcaaggcatattgtatgccgccgacatcgatgcggacgtcattaacatgtctctgggtggaggaggctataatcagagcatggatgaggctgttcaaacagcagttgctcagggaaccattgtagtagcagcgactggcaatgatggtgcatcgtcgatcagttatcctgctgcctacagcagcgtcattgcggtgggatctgtgacgtccaatcgtacacgatcctcgttttctaactatggatctgggcttgaagttatggcaccgggcagcaacatctacagtacgtatcctaattccagatattgttctttgagtggtacaagcatggctactccgcacgttgcgggcgtagctgggctcattcgcgcagccaacccagacatatctgtcgcgcaagcccgtcagattctgcgggataccgcgcaagaagcaggatcgttcacacagtacggctatggaatcgtcgatgctcatgccgccgttgttgctgcatccggtggtagcggcggc

SEQ ID NO: 2198 - protein, 413 aa, synthetic construct
  REGION 1..413: note = Variant of serine peptidase from Bacillus sinesaloumensis
MADQASQANGNQDVIEGELIVSVEPKNGKPDVSIQSAQSVTGQEDVLKSKGFTIVDTLHVEDSSVKPLVSKNFNKKVVEKMGLVYLVQYSPDQFKSSNIAKKELRKELMDLGFKVRYISENYKMMAIEGTATLQAVHPNQNWHYNMIKAPEAWAITSGSSSVKVAVLDTGIDHNHPSLANFVNTNLGRSFVGGNTMDVQGHGTHVAGTIASYGSVSGVMQSATLIPVKVLDNSGSGSLYGITQGILYAADIDADVINMSLGGGGYNQSMDEAVQTAVAQGTIVVAATGNDGASSISYPAAYSSVIAVGSVTSNRTRSSFSNYGSGLEVMAPGSNIYSTYPNSRYCSLSGTSMATPHVAGVAGLIRAANPDISVAQARQILRDTAQEAGSFTQYGYGIVDAHAAVVAASGGSGG

SEQ ID NO: 2199 - DNA, 1239 bp, synthetic construct
  misc_feature 1..1239: note = Variant of serine peptidase from Bacillus sinesaloumensis
  source 1..1239: mol_type = other DNA
atggcagatcaagctagtcaagctaatggaaaccaggacgtcattgaaggcgagctgatcgtttcagtggaaccgaagaacggtaaacctgatgtgagcattcaaagtgcacaatccgtaacagggcaggaagacgtccttaaatcgaaaggctttacgatcgttgataccttgcatgtagaggatagcagcgtcaagccactcgtctcgaagaatttcaataagaaagtggtggagaagatgggactggtgtatcttgttcaatactctccggaccagtttaaaagttccaacattgcgaagaaagaactcagaaaagaattgatggatctgggctttaaagtccgctatataagcgaaaattacaagatgatggcgatcgaaggtacagccactcttcaggcagtacaccctaaccaaaactggcattataatatgattaaagctccggaagcgtgggctattacgtctggatcctctagcgttaaagtagcagtcctggatacagggatcgaccataatcacccatccttggccaacttcgtgaatactaatcttggccggtcgtttgttggaggaaacaccatggatgttcaaggtcatggcacacatgttgctggcacgattgcatcttatgggagtgtaagcggagtgatgcagagtgcgacactgatcccggtcaaagtgctcgataattctggcagcgggtccctttacggtattacgcaaggcatattgtatgccgccgacatcgatgcggacgtcattaacatgtctctgggtggaggaggctataatcagagcatggatgaggctgttcaaacagcagttgctcagggaaccattgtagtagcagcgactggcaatgatggtgcatcgtcgatcagttatcctgctgcctacagcagcgtcattgcggtgggatctgtgacgtccaatcgtacacgatcctcgttttctaactatggatctgggcttgaagttatggcaccgggcagcaacatctacagtacgtatcctaattccagatataagtctttgagtggtacaagcatggctactccgcacgttgcgggcgtagctgggctcattcgcgcagccaacccagacatatctgtcgcgcaagcccgtcagattctgcgggataccgcgcaagaagcaggatcgttcacacagtacggctatggaatcgtcgatgctcatgccgccgttgttgctgcatccggtggtagcggcggc

SEQ ID NO: 2200 - protein, 413 aa, synthetic construct
  REGION 1..413: note = Variant of serine peptidase from Bacillus sinesaloumensis
MADQASQANGNQDVIEGELIVSVEPKNGKPDVSIQSAQSVTGQEDVLKSKGFTIVDTLHVEDSSVKPLVSKNFNKKVVEKMGLVYLVQYSPDQFKSSNIAKKELRKELMDLGFKVRYISENYKMMAIEGTATLQAVHPNQNWHYNMIKAPEAWAITSGSSSVKVAVLDTGIDHNHPSLANFVNTNLGRSFVGGNTMDVQGHGTHVAGTIASYGSVSGVMQSATLIPVKVLDNSGSGSLYGITQGILYAADIDADVINMSLGGGGYNQSMDEAVQTAVAQGTIVVAATGNDGASSISYPAAYSSVIAVGSVTSNRTRSSFSNYGSGLEVMAPGSNIYSTYPNSRYKSLSGTSMATPHVAGVAGLIRAANPDISVAQARQILRDTAQEAGSFTQYGYGIVDAHAAVVAASGGSGG

SEQ ID NO: 2201 - DNA, 1239 bp, synthetic construct; identical to SEQ ID NO: 883
  misc_feature 1..1239: note = Variant of serine peptidase from Bacillus sinesaloumensis
  source 1..1239: mol_type = other DNA

SEQ ID NO: 2202 - protein, 413 aa, synthetic construct; identical to SEQ ID NO: 884
  REGION 1..413: note = Variant of serine peptidase from Bacillus sinesaloumensis

SEQ ID NO: 2203 - DNA, 1239 bp, synthetic construct
  misc_feature 1..1239: note = Variant of serine peptidase from Bacillus sinesaloumensis
  source 1..1239: mol_type = other DNA
atggcagatcaagctagtcaagctaatggaaaccaggacgtcattgaaggcgagctgatcgtttcagtggaaccgaagaacggtaaacctgatgtgagcattcaaagtgcacaatccgtaacagggcaggaagacgtccttaaatcgaaaggctttacgatcgttgataccttgcatgtagaggatagcagcgtcaagccactcgtctcgaagaatttcaataagaaagtggtggagaagatgggactggtgtatcttgttcaatactctccggaccagtttaaaagttccaacattgcgaagaaagaactcagaaaagaattgatggatctgggctttaaagtccgctatataagcgaaaattacaagatgatggcgatcgaaggtacagccactcttcaggcagtacaccctaaccaaaactggcattataatatgattaaagctccggaagcgtgggctattacgtctggatcctctagcgttaaagtagcagtcctggatacagggatcgaccataatcacccatccttggccaacttcgtgaatactaatcttggccggtcgtttgttggaggaaacaccatggatgttcaaggtcatggcacacatgttgctggcacgattgcatcttatgggagtgtaagcggagtgatgcagagtgcgacactgatcccggtcaaagtgctcgataattctggcagcgggtccctttacggtattacgcaaggcatattgtatgccgccgacatcgatgcggacgtcattaacatgtctctgggtggaggaggctataatcagagcatggatgaggctgttcaaacagcagttgctcagggaaccattgtagtagcagcgactggcaatgatggtgcatcgtcgatcagttatcctgctgcctacagcagcgtcattgcggtgggatctgtgacgtccaatcgtacacgatcctcgttttctaactatggatctgggcttgaagttatggcaccgggcagcaacatctacagtacgtatcctaattccagatatacacagttgagtggtacaagcatggctactccgcacgttgcgggcgtagctgggctcattcgcgcagccaacccagacatatctgtcgcgcaagcccgtcagattctgcgggataccgcgcaagaagcaggatcgttcacacagtacggctatggaatcgtcgatgctcatgccgccgttgttgctgcatccggtggtagcggcggc

SEQ ID NO: 2204 - protein, 413 aa, synthetic construct
  REGION 1..413: note = Variant of serine peptidase from Bacillus sinesaloumensis
MADQASQANGNQDVIEGELIVSVEPKNGKPDVSIQSAQSVTGQEDVLKSKGFTIVDTLHVEDSSVKPLVSKNFNKKVVEKMGLVYLVQYSPDQFKSSNIAKKELRKELMDLGFKVRYISENYKMMAIEGTATLQAVHPNQNWHYNMIKAPEAWAITSGSSSVKVAVLDTGIDHNHPSLANFVNTNLGRSFVGGNTMDVQGHGTHVAGTIASYGSVSGVMQSATLIPVKVLDNSGSGSLYGITQGILYAADIDADVINMSLGGGGYNQSMDEAVQTAVAQGTIVVAATGNDGASSISYPAAYSSVIAVGSVTSNRTRSSFSNYGSGLEVMAPGSNIYSTYPNSRYTQLSGTSMATPHVAGVAGLIRAANPDISVAQARQILRDTAQEAGSFTQYGYGIVDAHAAVVAASGGSGG

SEQ ID NO: 2205 - DNA, 1239 bp, synthetic construct; identical to SEQ ID NO: 707
  misc_feature 1..1239: note = Variant of serine peptidase from Bacillus sinesaloumensis
  source 1..1239: mol_type = other DNA

SEQ ID NO: 2206 - protein, 413 aa, synthetic construct; identical to SEQ ID NO: 708
  REGION 1..413: note = Variant of serine peptidase from Bacillus sinesaloumensis

SEQ ID NO: 2207 - DNA, 1239 bp, synthetic construct
  misc_feature 1..1239: note = Variant of serine peptidase from Bacillus sinesaloumensis
  source 1..1239: mol_type = other DNA
atggcagatcaagctagtcaagctaatggaaaccaggacgtcattgaaggcgagctgatcgtttcagtggaaccgaagaacggtaaacctgatgtgagcattcaaagtgcacaatccgtaacagggcaggaagacgtccttaaatcgaaaggctttacgatcgttgataccttgcatgtagaggatagcagcgtcaagccactcgtctcgaagaatttcaataagaaagtggtggagaagatgggactggtgtatcttgttcaatactctccggaccagtttaaaagttccaacattgcgaagaaagaactcagaaaagaattgatggatctgggctttaaagtccgctatataagcgaaaattacaagatgatggcgatcgaaggtacagccactcttcaggcagtacaccctaaccaaaactggcattataatatgattaaagctccggaagcgtgggctattacgtctggatcctctagcgttaaagtagcagtcctggatacagggatcgaccataatcacccatccttggccaacttcgtgaatactaatcttggccggtcgtttgttggaggaaacaccatggatgttcaaggtcatggcacacatgttgctggcacgattgcatcttatgggagtgtaagcggagtgatgcagagtgcgacactgatcccggtcaaagtgctcgataattctggcagcgggtccctttacggtattacgcaaggcatattgtatgccgccgacatcgatgcggacgtcattaacatgtctctgggtggaggaggctataatcagagcatggatgaggctgttcaaacagcagttgctcagggaaccattgtagtagcagcgactggcaatgatggtgcatcgtcgatcagttatcctgctgcctacagcagcgtcattgcggtgggatctgtgacgtccaatcgtacacgatcctcgttttctaactatggatctgggcttgaagttatggcaccgggcagcaacatctacagtacgtatcctaattccagatatacaaggttgagtggtacaagcatggctactccgcacgttgcgggcgtagctgggctcattcgcgcagccaacccagacatatctgtcgcgcaagcccgtcagattctgcgggataccgcgcaagaagcaggatcgttcacacagtacggctatggaatcgtcgatgctcatgccgccgttgttgctgcatccggtggtagcggcggc

SEQ ID NO: 2208 - protein, 413 aa, synthetic construct
  REGION 1..413: note = Variant of serine peptidase from Bacillus sinesaloumensis
MADQASQANGNQDVIEGELIVSVEPKNGKPDVSIQSAQSVTGQEDVLKSKGFTIVDTLHVEDSSVKPLVSKNFNKKVVEKMGLVYLVQYSPDQFKSSNIAKKELRKELMDLGFKVRYISENYKMMAIEGTATLQAVHPNQNWHYNMIKAPEAWAITSGSSSVKVAVLDTGIDHNHPSLANFVNTNLGRSFVGGNTMDVQGHGTHVAGTIASYGSVSGVMQSATLIPVKVLDNSGSGSLYGITQGILYAADIDADVINMSLGGGGYNQSMDEAVQTAVAQGTIVVAATGNDGASSISYPAAYSSVIAVGSVTSNRTRSSFSNYGSGLEVMAPGSNIYSTYPNSRYTRLSGTSMATPHVAGVAGLIRAANPDISVAQARQILRDTAQEAGSFTQYGYGIVDAHAAVVAASGGSGG

SEQ ID NO: 2209 - DNA, 1239 bp, synthetic construct
  misc_feature 1..1239: note = Variant of serine peptidase from Bacillus sinesaloumensis
  source 1..1239: mol_type = other DNA
atggcagatcaagctagtcaagctaatggaaaccaggacgtcattgaaggcgagctgatcgtttcagtggaaccgaagaacggtaaacctgatgtgagcattcaaagtgcacaatccgtaacagggcaggaagacgtccttaaatcgaaaggctttacgatcgttgataccttgcatgtagaggatagcagcgtcaagccactcgtctcgaagaatttcaataagaaagtggtggagaagatgggactggtgtatcttgttcaatactctccggaccagtttaaaagttccaacattgcgaagaaagaactcagaaaagaattgatggatctgggctttaaagtccgctatataagcgaaaattacaagatgatggcgatcgaaggtacagccactcttcaggcagtacaccctaaccaaaactggcattataatatgattaaagctccggaagcgtgggctattacgtctggatcctctagcgttaaagtagcagtcctggatacagggatcgaccataatcacccatccttggccaacttcgtgaatactaatcttggccggtcgtttgttggaggaaacaccatggatgttcaaggtcatggcacacatgttgctggcacgattgcatcttatgggagtgtaagcggagtgatgcagagtgcgacactgatcccggtcaaagtgctcgataattctggcagcgggtccctttacggtattacgcaaggcatattgtatgccgccgacatcgatgcggacgtcattaacatgtctctgggtggaggaggctataatcagagcatggatgaggctgttcaaacagcagttgctcagggaaccattgtagtagcagcgactggcaatgatggtgcatcgtcgatcagttatcctgctgcctacagcagcgtcattgcggtgggatctgtgacgtccaatcgtacacgatcctcgttttctaactatggatctgggcttgaagttatggcaccgggcagcaacatctacagtacgtatcctaattccagatatacaccgttgagtggtacaagcatggctactccgcacgttgcgggcgtagctgggctcattcgcgcagccaacccagacatatctgtcgcgcaagcccgtcagattctgcgggataccgcgcaagaagcaggatcgttcacacagtacggctatggaatcgtcgatgctcatgccgccgttgttgctgcatccggtggtagcggcggc

SEQ ID NO: 2210 - protein, 413 aa, synthetic construct
  REGION 1..413: note = Variant of serine peptidase from Bacillus sinesaloumensis
MADQASQANGNQDVIEGELIVSVEPKNGKPDVSIQSAQSVTGQEDVLKSKGFTIVDTLHVEDSSVKPLVSKNFNKKVVEKMGLVYLVQYSPDQFKSSNIAKKELRKELMDLGFKVRYISENYKMMAIEGTATLQAVHPNQNWHYNMIKAPEAWAITSGSSSVKVAVLDTGIDHNHPSLANFVNTNLGRSFVGGNTMDVQGHGTHVAGTIASYGSVSGVMQSATLIPVKVLDNSGSGSLYGITQGILYAADIDADVINMSLGGGGYNQSMDEAVQTAVAQGTIVVAATGNDGASSISYPAAYSSVIAVGSVTSNRTRSSFSNYGSGLEVMAPGSNIYSTYPNSRYTPLSGTSMATPHVAGVAGLIRAANPDISVAQARQILRDTAQEAGSFTQYGYGIVDAHAAVVAASGGSGG

SEQ ID NO: 2211 - DNA, 1239 bp, synthetic construct
  misc_feature 1..1239: note = Variant of serine peptidase from Bacillus sinesaloumensis
  source 1..1239: mol_type = other DNA
atggcagatcaagctagtcaagctaatggaaaccaggacgtcattgaaggcgagctgatcgtttcagtggaaccgaagaacggtaaacctgatgtgagcattcaaagtgcacaatccgtaacagggcaggaagacgtccttaaatcgaaaggctttacgatcgttgataccttgcatgtagaggatagcagcgtcaagccactcgtctcgaagaatttcaataagaaagtggtggagaagatgggactggtgtatcttgttcaatactctccggaccagtttaaaagttccaacattgcgaagaaagaactcagaaaagaattgatggatctgggctttaaagtccgctatataagcgaaaattacaagatgatggcgatcgaaggtacagccactcttcaggcagtacaccctaaccaaaactggcattataatatgattaaagctccggaagcgtgggctattacgtctggatcctctagcgttaaagtagcagtcctggatacagggatcgaccataatcacccatccttggccaacttcgtgaatactaatcttggccggtcgtttgttggaggaaacaccatggatgttcaaggtcatggcacacatgttgctggcacgattgcatcttatgggagtgtaagcggagtgatgcagagtgcgacactgatcccggtcaaagtgctcgataattctggcagcgggtccctttacggtattacgcaaggcatattgtatgccgccgacatcgatgcggacgtcattaacatgtctctgggtggaggaggctataatcagagcatggatgaggctgttcaaacagcagttgctcagggaaccattgtagtagcagcgactggcaatgatggtgcatcgtcgatcagttatcctgctgcctacagcagcgtcattgcggtgggatctgtgacgtccaatcgtacacgatcctcgttttctaactatggatctgggcttgaagttatggcaccgggcagcaacatctacagtacgtatcctaattccagatatacattgttgagtggtacaagcatggctactccgcacgttgcgggcgtagctgggctcattcgcgcagccaacccagacatatctgtcgcgcaagcccgtcagattctgcgggataccgcgcaagaagcaggatcgttcacacagtacggctatggaatcgtcgatgctcatgccgccgttgttgctgcatccggtggtagcggcggc

SEQ ID NO: 2212 - protein, 413 aa, synthetic construct
  REGION 1..413: note = Variant of serine peptidase from Bacillus sinesaloumensis
MADQASQANGNQDVIEGELIVSVEPKNGKPDVSIQSAQSVTGQEDVLKSKGFTIVDTLHVEDSSVKPLVSKNFNKKVVEKMGLVYLVQYSPDQFKSSNIAKKELRKELMDLGFKVRYISENYKMMAIEGTATLQAVHPNQNWHYNMIKAPEAWAITSGSSSVKVAVLDTGIDHNHPSLANFVNTNLGRSFVGGNTMDVQGHGTHVAGTIASYGSVSGVMQSATLIPVKVLDNSGSGSLYGITQGILYAADIDADVINMSLGGGGYNQSMDEAVQTAVAQGTIVVAATGNDGASSISYPAAYSSVIAVGSVTSNRTRSSFSNYGSGLEVMAPGSNIYSTYPNSRYTLLSGTSMATPHVAGVAGLIRAANPDISVAQARQILRDTAQEAGSFTQYGYGIVDAHAAVVAASGGSGG

SEQ ID NO: 2213 - DNA, 1239 bp, synthetic construct
  misc_feature 1..1239: note = Variant of serine peptidase from Bacillus sinesaloumensis
  source 1..1239: mol_type = other DNA
atggcagatcaagctagtcaagctaatggaaaccaggacgtcattgaaggcgagctgatcgtttcagtggaaccgaagaacggtaaacctgatgtgagcattcaaagtgcacaatccgtaacagggcaggaagacgtccttaaatcgaaaggctttacgatcgttgataccttgcatgtagaggatagcagcgtcaagccactcgtctcgaagaatttcaataagaaagtggtggagaagatgggactggtgtatcttgttcaatactctccggaccagtttaaaagttccaacattgcgaagaaagaactcagaaaagaattgatggatctgggctttaaagtccgctatataagcgaaaattacaagatgatggcgatcgaaggtacagccactcttcaggcagtacaccctaaccaaaactggcattataatatgattaaagctccggaagcgtgggctattacgtctggatcctctagcgttaaagtagcagtcctggatacagggatcgaccataatcacccatccttggccaacttcgtgaatactaatcttggccggtcgtttgttggaggaaacaccatggatgttcaaggtcatggcacacatgttgctggcacgattgcatcttatgggagtgtaagcggagtgatgcagagtgcgacactgatcccggtcaaagtgctcgataattctggcagcgggtccctttacggtattacgcaaggcatattgtatgccgccgacatcgatgcggacgtcattaacatgtctctgggtggaggaggctataatcagagcatggatgaggctgttcaaacagcagttgctcagggaaccattgtagtagcagcgactggcaatgatggtgcatcgtcgatcagttatcctgctgcctacagcagcgtcattgcggtgggatctgtgacgtccaatcgtacacgatcctcgttttctaactatggatctgggcttgaagttatggcaccgggcagcaacatctacagtacgtatcctaattccagatatacagatttgagtggtacaagcatggctactccgcacgttgcgggcgtagctgggctcattcgcgcagccaacccagacatatctgtcgcgcaagcccgtcagattctgcgggataccgcgcaagaagcaggatcgttcacacagtacggctatggaatcgtcgatgctcatgccgccgttgttgctgcatccggtggtagcggcggc

SEQ ID NO: 2214 - protein, 413 aa, synthetic construct
  REGION 1..413: note = Variant of serine peptidase from Bacillus sinesaloumensis
MADQASQANGNQDVIEGELIVSVEPKNGKPDVSIQSAQSVTGQEDVLKSKGFTIVDTLHVEDSSVKPLVSKNFNKKVVEKMGLVYLVQYSPDQFKSSNIAKKELRKELMDLGFKVRYISENYKMMAIEGTATLQAVHPNQNWHYNMIKAPEAWAITSGSSSVKVAVLDTGIDHNHPSLANFVNTNLGRSFVGGNTMDVQGHGTHVAGTIASYGSVSGVMQSATLIPVKVLDNSGSGSLYGITQGILYAADIDADVINMSLGGGGYNQSMDEAVQTAVAQGTIVVAATGNDGASSISYPAAYSSVIAVGSVTSNRTRSSFSNYGSGLEVMAPGSNIYSTYPNSRYTDLSGTSMATPHVAGVAGLIRAANPDISVAQARQILRDTAQEAGSFTQYGYGIVDAHAAVVAASGGSGG

SEQ ID NO: 2215 - DNA, 1239 bp, synthetic construct
  misc_feature 1..1239: note = Variant of serine peptidase from Bacillus sinesaloumensis
  source 1..1239: mol_type = other DNA
atggcagatcaagctagtcaagctaatggaaaccaggacgtcattgaaggcgagctgatcgtttcagtggaaccgaagaacggtaaacctgatgtgagcattcaaagtgcacaatccgtaacagggcaggaagacgtccttaaatcgaaaggctttacgatcgttgataccttgcatgtagaggatagcagcgtcaagccactcgtctcgaagaatttcaataagaaagtggtggagaagatgggactggtgtatcttgttcaatactctccggaccagtttaaaagttccaacattgcgaagaaagaactcagaaaagaattgatggatctgggctttaaagtccgctatataagcgaaaattacaagatgatggcgatcgaaggtacagccactcttcaggcagtacaccctaaccaaaactggcattataatatgattaaagctccggaagcgtgggctattacgtctggatcctctagcgttaaagtagcagtcctggatacagggatcgaccataatcacccatccttggccaacttcgtgaatactaatcttggccggtcgtttgttggaggaaacaccatggatgttcaaggtcatggcacacatgttgctggcacgattgcatcttatgggagtgtaagcggagtgatgcagagtgcgacactgatcccggtcaaagtgctcgataattctggcagcgggtccctttacggtattacgcaaggcatattgtatgccgccgacatcgatgcggacgtcattaacatgtctctgggtggaggaggctataatcagagcatggatgaggctgttcaaacagcagttgctcagggaaccattgtagtagcagcgactggcaatgatggtgcatcgtcgatcagttatcctgctgcctacagcagcgtcattgcggtgggatctgtgacgtccaatcgtacacgatcctcgttttctaactatggatctgggcttgaagttatggcaccgggcagcaacatctacagtacgtatcctaattccagatatacatggttgagtggtacaagcatggctactccgcacgttgcgggcgtagctgggctcattcgcgcagccaacccagacatatctgtcgcgcaagcccgtcagattctgcgggataccgcgcaagaagcaggatcgttcacacagtacggctatggaatcgtcgatgctcatgccgccgttgttgctgcatccggtggtagcggcggc

SEQ ID NO: 2216 - protein, 413 aa, synthetic construct
  REGION 1..413: note = Variant of serine peptidase from Bacillus sinesaloumensis
MADQASQANGNQDVIEGELIVSVEPKNGKPDVSIQSAQSVTGQEDVLKSKGFTIVDTLHVEDSSVKPLVSKNFNKKVVEKMGLVYLVQYSPDQFKSSNIAKKELRKELMDLGFKVRYISENYKMMAIEGTATLQAVHPNQNWHYNMIKAPEAWAITSGSSSVKVAVLDTGIDHNHPSLANFVNTNLGRSFVGGNTMDVQGHGTHVAGTIASYGSVSGVMQSATLIPVKVLDNSGSGSLYGITQGILYAADIDADVINMSLGGGGYNQSMDEAVQTAVAQGTIVVAATGNDGASSISYPAAYSSVIAVGSVTSNRTRSSFSNYGSGLEVMAPGSNIYSTYPNSRYTWLSGTSMATPHVAGVAGLIRAANPDISVAQARQILRDTAQEAGSFTQYGYGIVDAHAAVVAASGGSGG

SEQ ID NO: 2217 - DNA, 1239 bp, synthetic construct
  misc_feature 1..1239: note = Variant of serine peptidase from Bacillus sinesaloumensis
  source 1..1239: mol_type = other DNA
atggcagatcaagctagtcaagctaatggaaaccaggacgtcattgaaggcgagctgatcgtttcagtggaaccgaagaacggtaaacctgatgtgagcattcaaagtgcacaatccgtaacagggcaggaagacgtccttaaatcgaaaggctttacgatcgttgataccttgcatgtagaggatagcagcgtcaagccactcgtctcgaagaatttcaataagaaagtggtggagaagatgggactggtgtatcttgttcaatactctccggaccagtttaaaagttccaacattgcgaagaaagaactcagaaaagaattgatggatctgggctttaaagtccgctatataagcgaaaattacaagatgatggcgatcgaaggtacagccactcttcaggcagtacaccctaaccaaaactggcattataatatgattaaagctccggaagcgtgggctattacgtctggatcctctagcgttaaagtagcagtcctggatacagggatcgaccataatcacccatccttggccaacttcgtgaatactaatcttggccggtcgtttgttggaggaaacaccatggatgttcaaggtcatggcacacatgttgctggcacgattgcatcttatgggagtgtaagcggagtgatgcagagtgcgacactgatcccggtcaaagtgctcgataattctggcagcgggtccctttacggtattacgcaaggcatattgtatgccgccgacatcgatgcggacgtcattaacatgtctctgggtggaggaggctataatcagagcatggatgaggctgttcaaacagcagttgctcagggaaccattgtagtagcagcgactggcaatgatggtgcatcgtcgatcagttatcctgctgcctacagcagcgtcattgcggtgggatctgtgacgtccaatcgtacacgatcctcgttttctaactatggatctgggcttgaagttatggcaccgggcagcaacatctacagtacgtatcctaattccagatatacaggtttgagtggtacaagcatggctactccgcacgttgcgggcgtagctgggctcattcgcgcagccaacccagacatatctgtcgcgcaagcccgtcagattctgcgggataccgcgcaagaagcaggatcgttcacacagtacggctatggaatcgtcgatgctcatgccgccgttgttgctgcatccggtggtagcggcggc

SEQ ID NO: 2218 - protein, 413 aa, synthetic construct
  REGION 1..413: note = Variant of serine peptidase from Bacillus sinesaloumensis
MADQASQANGNQDVIEGELIVSVEPKNGKPDVSIQSAQSVTGQEDVLKSKGFTIVDTLHVEDSSVKPLVSKNFNKKVVEKMGLVYLVQYSPDQFKSSNIAKKELRKELMDLGFKVRYISENYKMMAIEGTATLQAVHPNQNWHYNMIKAPEAWAITSGSSSVKVAVLDTGIDHNHPSLANFVNTNLGRSFVGGNTMDVQGHGTHVAGTIASYGSVSGVMQSATLIPVKVLDNSGSGSLYGITQGILYAADIDADVINMSLGGGGYNQSMDEAVQTAVAQGTIVVAATGNDGASSISYPAAYSSVIAVGSVTSNRTRSSFSNYGSGLEVMAPGSNIYSTYPNSRYTGLSGTSMATPHVAGVAGLIRAANPDISVAQARQILRDTAQEAGSFTQYGYGIVDAHAAVVAASGGSGG

SEQ ID NO: 2219 - DNA, 1239 bp, synthetic construct
  misc_feature 1..1239: note = Variant of serine peptidase from Bacillus sinesaloumensis
  source 1..1239: mol_type = other DNA
atggcagatcaagctagtcaagctaatggaaaccaggacgtcattgaaggcgagctgatcgtttcagtggaaccgaagaacggtaaacctgatgtgagcattcaaagtgcacaatccgtaacagggcaggaagacgtccttaaatcgaaaggctttacgatcgttgataccttgcatgtagaggatagcagcgtcaagccactcgtctcgaagaatttcaataagaaagtggtggagaagatgggactggtgtatcttgttcaatactctccggaccagtttaaaagttccaacattgcgaagaaagaactcagaaaagaattgatggatctgggctttaaagtccgctatataagcgaaaattacaagatgatggcgatcgaaggtacagccactcttcaggcagtacaccctaaccaaaactggcattataatatgattaaagctccggaagcgtgggctattacgtctggatcctctagcgttaaagtagcagtcctggatacagggatcgaccataatcacccatccttggccaacttcgtgaatactaatcttggccggtcgtttgttggaggaaacaccatggatgttcaaggtcatggcacacatgttgctggcacgattgcatcttatgggagtgtaagcggagtgatgcagagtgcgacactgatcccggtcaaagtgctcgataattctggcagcgggtccctttacggtattacgcaaggcatattgtatgccgccgacatcgatgcggacgtcattaacatgtctctgggtggaggaggctataatcagagcatggatgaggctgttcaaacagcagttgctcagggaaccattgtagtagcagcgactggcaatgatggtgcatcgtcgatcagttatcctgctgcctacagcagcgtcattgcggtgggatctgtgacgtccaatcgtacacgatcctcgttttctaactatggatctgggcttgaagttatggcaccgggcagcaacatctacagtacgtatcctaattccagatatacagcgttgagtggtacaagcatggctactccgcacgttgcgggcgtagctgggctcattcgcgcagccaacccagacatatctgtcgcgcaagcccgtcagattctgcgggataccgcgcaagaagcaggatcgttcacacagtacggctatggaatcgtcgatgctcatgccgccgttgttgctgcatccggtggtagcggcggc

SEQ ID NO: 2220 - protein, 413 aa, synthetic construct
  REGION 1..413: note = Variant of serine peptidase from Bacillus sinesaloumensis
MADQASQANGNQDVIEGELIVSVEPKNGKPDVSIQSAQSVTGQEDVLKSKGFTIVDTLHVEDSSVKPLVSKNFNKKVVEKMGLVYLVQYSPDQFKSSNIAKKELRKELMDLGFKVRYISENYKMMAIEGTATLQAVHPNQNWHYNMIKAPEAWAITSGSSSVKVAVLDTGIDHNHPSLANFVNTNLGRSFVGGNTMDVQGHGTHVAGTIASYGSVSGVMQSATLIPVKVLDNSGSGSLYGITQGILYAADIDADVINMSLGGGGYNQSMDEAVQTAVAQGTIVVAATGNDGASSISYPAAYSSVIAVGSVTSNRTRSSFSNYGSGLEVMAPGSNIYSTYPNSRYTALSGTSMATPHVAGVAGLIRAANPDISVAQARQILRDTAQEAGSFTQYGYGIVDAHAAVVAASGGSGG

SEQ ID NO: 2221 - DNA, 1239 bp, synthetic construct
  misc_feature 1..1239: note = Variant of serine peptidase from Bacillus sinesaloumensis
  source 1..1239: mol_type = other DNA
atggcagatcaagctagtcaagctaatggaaaccaggacgtcattgaaggcgagctgatcgtttcagtggaaccgaagaacggtaaacctgatgtgagcattcaaagtgcacaatccgtaacagggcaggaagacgtccttaaatcgaaaggctttacgatcgttgataccttgcatgtagaggatagcagcgtcaagccactcgtctcgaagaatttcaataagaaagtggtggagaagatgggactggtgtatcttgttcaatactctccggaccagtttaaaagttccaacattgcgaagaaagaactcagaaaagaattgatggatctgggctttaaagtccgctatataagcgaaaattacaagatgatggcgatcgaaggtacagccactcttcaggcagtacaccctaaccaaaactggcattataatatgattaaagctccggaagcgtgggctattacgtctggatcctctagcgttaaagtagcagtcctggatacagggatcgaccataatcacccatccttggccaacttcgtgaatactaatcttggccggtcgtttgttggaggaaacaccatggatgttcaaggtcatggcacacatgttgctggcacgattgcatcttatgggagtgtaagcggagtgatgcagagtgcgacactgatcccggtcaaagtgctcgataattctggcagcgggtccctttacggtattacgcaaggcatattgtatgccgccgacatcgatgcggacgtcattaacatgtctctgggtggaggaggctataatcagagcatggatgaggctgttcaaacagcagttgctcagggaaccattgtagtagcagcgactggcaatgatggtgcatcgtcgatcagttatcctgctgcctacagcagcgtcattgcggtgggatctgtgacgtccaatcgtacacgatcctcgttttctaactatggatctgggcttgaagttatggcaccgggcagcaacatctacagtacgtatcctaattccagatatacatgtttgagtggtacaagcatggctactccgcacgttgcgggcgtagctgggctcattcgcgcagccaacccagacatatctgtcgcgcaagcccgtcagattctgcgggataccgcgcaagaagcaggatcgttcacacagtacggctatggaatcgtcgatgctcatgccgccgttgttgctgcatccggtggtagcggcggc

SEQ ID NO: 2222 - protein, 413 aa, synthetic construct
  REGION 1..413: note = Variant of serine peptidase from Bacillus sinesaloumensis
MADQASQANGNQDVIEGELIVSVEPKNGKPDVSIQSAQSVTGQEDVLKSKGFTIVDTLHVEDSSVKPLVSKNFNKKVVEKMGLVYLVQYSPDQFKSSNIAKKELRKELMDLGFKVRYISENYKMMAIEGTATLQAVHPNQNWHYNMIKAPEAWAITSGSSSVKVAVLDTGIDHNHPSLANFVNTNLGRSFVGGNTMDVQGHGTHVAGTIASYGSVSGVMQSATLIPVKVLDNSGSGSLYGITQGILYAADIDADVINMSLGGGGYNQSMDEAVQTAVAQGTIVVAATGNDGASSISYPAAYSSVIAVGSVTSNRTRSSFSNYGSGLEVMAPGSNIYSTYPNSRYTCLSGTSMATPHVAGVAGLIRAANPDISVAQARQILRDTAQEAGSFTQYGYGIVDAHAAVVAASGGSGG

SEQ ID NO: 2223 - DNA, 1239 bp, synthetic construct
  misc_feature 1..1239: note = Variant of serine peptidase from Bacillus sinesaloumensis
  source 1..1239: mol_type = other DNA
atggcagatcaagctagtcaagctaatggaaaccaggacgtcattgaaggcgagctgatcgtttcagtggaaccgaagaacggtaaacctgatgtgagcattcaaagtgcacaatccgtaacagggcaggaagacgtccttaaatcgaaaggctttacgatcgttgataccttgcatgtagaggatagcagcgtcaagccactcgtctcgaagaatttcaataagaaagtggtggagaagatgggactggtgtatcttgttcaatactctccggaccagtttaaaagttccaacattgcgaagaaagaactcagaaaagaattgatggatctgggctttaaagtccgctatataagcgaaaattacaagatgatggcgatcgaaggtacagccactcttcaggcagtacaccctaaccaaaactggcattataatatgattaaagctccggaagcgtgggctattacgtctggatcctctagcgttaaagtagcagtcctggatacagggatcgaccataatcacccatccttggccaacttcgtgaatactaatcttggccggtcgtttgttggaggaaacaccatggatgttcaaggtcatggcacacatgttgctggcacgattgcatcttatgggagtgtaagcggagtgatgcagagtgcgacactgatcccggtcaaagtgctcgataattctggcagcgggtccctttacggtattacgcaaggcatattgtatgccgccgacatcgatgcggacgtcattaacatgtctctgggtggaggaggctataatcagagcatggatgaggctgttcaaacagcagttgctcagggaaccattgtagtagcagcgactggcaatgatggtgcatcgtcgatcagttatcctgctgcctacagcagcgtcattgcggtgggatctgtgacgtccaatcgtacacgatcctcgttttctaactatggatctgggcttgaagttatggcaccgggcagcaacatctacagtacgtatcctaattccagatatacaatgttgagtggtacaagcatggctactccgcacgttgcgggcgtagctgggctcattcgcgcagccaacccagacatatctgtcgcgcaagcccgtcagattctgcgggataccgcgcaagaagcaggatcgttcacacagtacggctatggaatcgtcgatgctcatgccgccgttgttgctgcatccggtggtagcggcggc

SEQ ID NO: 2224 - protein, 413 aa, synthetic construct
  REGION 1..413: note = Variant of serine peptidase from Bacillus sinesaloumensis
MADQASQANGNQDVIEGELIVSVEPKNGKPDVSIQSAQSVTGQEDVLKSKGFTIVDTLHVEDSSVKPLVSKNFNKKVVEKMGLVYLVQYSPDQFKSSNIAKKELRKELMDLGFKVRYISENYKMMAIEGTATLQAVHPNQNWHYNMIKAPEAWAITSGSSSVKVAVLDTGIDHNHPSLANFVNTNLGRSFVGGNTMDVQGHGTHVAGTIASYGSVSGVMQSATLIPVKVLDNSGSGSLYGITQGILYAADIDADVINMSLGGGGYNQSMDEAVQTAVAQGTIVVAATGNDGASSISYPAAYSSVIAVGSVTSNRTRSSFSNYGSGLEVMAPGSNIYSTYPNSRYTMLSGTSMATPHVAGVAGLIRAANPDISVAQARQILRDTAQEAGSFTQYGYGIVDAHAAVVAASGGSGG

SEQ ID NO: 2225 - DNA, 1239 bp, synthetic construct
  misc_feature 1..1239: note = Variant of serine peptidase from Bacillus sinesaloumensis
  source 1..1239: mol_type = other DNA
atggcagatcaagctagtcaagctaatggaaaccaggacgtcattgaaggcgagctgatcgtttcagtggaaccgaagaacggtaaacctgatgtgagcattcaaagtgcacaatccgtaacagggcaggaagacgtccttaaatcgaaaggctttacgatcgttgataccttgcatgtagaggatagcagcgtcaagccactcgtctcgaagaatttcaataagaaagtggtggagaagatgggactggtgtatcttgttcaatactctccggaccagtttaaaagttccaacattgcgaagaaagaactcagaaaagaattgatggatctgggctttaaagtccgctatataagcgaaaattacaagatgatggcgatcgaaggtacagccactcttcaggcagtacaccctaaccaaaactggcattataatatgattaaagctccggaagcgtgggctattacgtctggatcctctagcgttaaagtagcagtcctggatacagggatcgaccataatcacccatccttggccaacttcgtgaatactaatcttggccggtcgtttgttggaggaaacaccatggatgttcaaggtcatggcacacatgttgctggcacgattgcatcttatgggagtgtaagcggagtgatgcagagtgcgacactgatcccggtcaaagtgctcgataattctggcagcgggtccctttacggtattacgcaaggcatattgtatgccgccgacatcgatgcggacgtcattaacatgtctctgggtggaggaggctataatcagagcatggatgaggctgttcaaacagcagttgctcagggaaccattgtagtagcagcgactggcaatgatggtgcatcgtcgatcagttatcctgctgcctacagcagcgtcattgcggtgggatctgtgacgtccaatcgtacacgatcctcgttttctaactatggatctgggcttgaagttatggcaccgggcagcaacatctacagtacgtatcctaattccagatatacatttttgagtggtacaagcatggctactccgcacgttgcgggcgtagctgggctcattcgcgcagccaacccagacatatctgtcgcgcaagcccgtcagattctgcgggataccgcgcaagaagcaggatcgttcacacagtacggctatggaatcgtcgatgctcatgccgccgttgttgctgcatccggtggtagcggcggc

SEQ ID NO: 2226 - protein, 413 aa, synthetic construct
  REGION 1..413: note = Variant of serine peptidase from Bacillus sinesaloumensis
MADQASQANGNQDVIEGELIVSVEPKNGKPDVSIQSAQSVTGQEDVLKSKGFTIVDTLHVEDSSVKPLVSKNFNKKVVEKMGLVYLVQYSPDQFKSSNIAKKELRKELMDLGFKVRYISENYKMMAIEGTATLQAVHPNQNWHYNMIKAPEAWAITSGSSSVKVAVLDTGIDHNHPSLANFVNTNLGRSFVGGNTMDVQGHGTHVAGTIASYGSVSGVMQSATLIPVKVLDNSGSGSLYGITQGILYAADIDADVINMSLGGGGYNQSMDEAVQTAVAQGTIVVAATGNDGASSISYPAAYSSVIAVGSVTSNRTRSSFSNYGSGLEVMAPGSNIYSTYPNSRYTFLSGTSMATPHVAGVAGLIRAANPDISVAQARQILRDTAQEAGSFTQYGYGIVDAHAAVVAASGGSGG

SEQ ID NO: 2227 - DNA, 1239 bp, synthetic construct
  misc_feature 1..1239: note = Variant of serine peptidase from Bacillus sinesaloumensis
  source 1..1239: mol_type = other DNA
atggcagatcaagctagtcaagctaatggaaaccaggacgtcattgaaggcgagctgatcgtttcagtggaaccgaagaacggtaaacctgatgtgagcattcaaagtgcacaatccgtaacagggcaggaagacgtccttaaatcgaaaggctttacgatcgttgataccttgcatgtagaggatagcagcgtcaagccactcgtctcgaagaatttcaataagaaagtggtggagaagatgggactggtgtatcttgttcaatactctccggaccagtttaaaagttccaacattgcgaagaaagaactcagaaaagaattgatggatctgggctttaaagtccgctatataagcgaaaattacaagatgatggcgatcgaaggtacagccactcttcaggcagtacaccctaaccaaaactggcattataatatgattaaagctccggaagcgtgggctattacgtctggatcctctagcgttaaagtagcagtcctggatacagggatcgaccataatcacccatccttggccaacttcgtgaatactaatcttggccggtcgtttgttggaggaaacaccatggatgttcaaggtcatggcacacatgttgctggcacgattgcatcttatgggagtgtaagcggagtgatgcagagtgcgacactgatcccggtcaaagtgctcgataattctggcagcgggtccctttacggtattacgcaaggcatattgtatgccgccgacatcgatgcggacgtcattaacatgtctctgggtggaggaggctataatcagagcatggatgaggctgttcaaacagcagttgctcagggaaccattgtagtagcagcgactggcaatgatggtgcatcgtcgatcagttatcctgctgcctacagcagcgtcattgcggtgggatctgtgacgtccaatcgtacacgatcctcgttttctaactatggatctgggcttgaagttatggcaccgggcagcaacatctacagtacgtatcctaattccagatatacaaatttgagtggtacaagcatggctactccgcacgttgcgggcgtagctgggctcattcgcgcagccaacccagacatatctgtcgcgcaagcccgtcagattctgcgggataccgcgcaagaagcaggatcgttcacacagtacggctatggaatcgtcgatgctcatgccgccgttgttgctgcatccggtggtagcggcggc

SEQ ID NO: 2228 - protein, 413 aa, synthetic construct
  REGION 1..413: note = Variant of serine peptidase from Bacillus sinesaloumensis
MADQASQANGNQDVIEGELIVSVEPKNGKPDVSIQSAQSVTGQEDVLKSKGFTIVDTLHVEDSSVKPLVSKNFNKKVVEKMGLVYLVQYSPDQFKSSNIAKKELRKELMDLGFKVRYISENYKMMAIEGTATLQAVHPNQNWHYNMIKAPEAWAITSGSSSVKVAVLDTGIDHNHPSLANFVNTNLGRSFVGGNTMDVQGHGTHVAGTIASYGSVSGVMQSATLIPVKVLDNSGSGSLYGITQGILYAADIDADVINMSLGGGGYNQSMDEAVQTAVAQGTIVVAATGNDGASSISYPAAYSSVIAVGSVTSNRTRSSFSNYGSGLEVMAPGSNIYSTYPNSRYTNLSGTSMATPHVAGVAGLIRAANPDISVAQARQILRDTAQEAGSFTQYGYGIVDAHAAVVAASGGSGG

SEQ ID NO: 2229 - DNA, 1239 bp, synthetic construct
  misc_feature 1..1239: note = Variant of serine peptidase from Bacillus sinesaloumensis
  source 1..1239: mol_type = other DNA
atggcagatcaagctagtcaagctaatggaaaccaggacgtcattgaaggcgagctgatcgtttcagtggaaccgaagaacggtaaacctgatgtgagcattcaaagtgcacaatccgtaacagggcaggaagacgtccttaaatcgaaaggctttacgatcgttgataccttgcatgtagaggatagcagcgtcaagccactcgtctcgaagaatttcaataagaaagtggtggagaagatgggactggtgtatcttgttcaatactctccggaccagtttaaaagttccaacattgcgaagaaagaactcagaaaagaattgatggatctgggctttaaagtccgctatataagcgaaaattacaagatgatggcgatcgaaggtacagccactcttcaggcagtacaccctaaccaaaactggcattataatatgattaaagctccggaagcgtgggctattacgtctggatcctctagcgttaaagtagcagtcctggatacagggatcgaccataatcacccatccttggccaacttcgtgaatactaatcttggccggtcgtttgttggaggaaacaccatggatgttcaaggtcatggcacacatgttgctggcacgattgcatcttatgggagtgtaagcggagtgatgcagagtgcgacactgatcccggtcaaagtgctcgataattctggcagcgggtccctttacggtattacgcaaggcatattgtatgccgccgacatcgatgcggacgtcattaacatgtctctgggtggaggaggctataatcagagcatggatgaggctgttcaaacagcagttgctcagggaaccattgtagtagcagcgactggcaatgatggtgcatcgtcgatcagttatcctgctgcctacagcagcgtcattgcggtgggatctgtgacgtccaatcgtacacgatcctcgttttctaactatggatctgggcttgaagttatggcaccgggcagcaacatctacagtacgtatcctaattccagatatacatatttgagtggtacaagcatggctactccgcacgttgcgggcgtagctgggctcattcgcgcagccaacccagacatatctgtcgcgcaagcccgtcagattctgcgggataccgcgcaagaagcaggatcgttcacacagtacggctatggaatcgtcgatgctcatgccgccgttgttgctgcatccggtggtagcggcggc

SEQ ID NO: 2230 - protein, 413 aa, synthetic construct
  REGION 1..413: note = Variant of serine peptidase from Bacillus sinesaloumensis
MADQASQANGNQDVIEGELIVSVEPKNGKPDVSIQSAQSVTGQEDVLKSKGFTIVDTLHVEDSSVKPLVSKNFNKKVVEKMGLVYLVQYSPDQFKSSNIAKKELRKELMDLGFKVRYISENYKMMAIEGTATLQAVHPNQNWHYNMIKAPEAWAITSGSSSVKVAVLDTGIDHNHPSLANFVNTNLGRSFVGGNTMDVQGHGTHVAGTIASYGSVSGVMQSATLIPVKVLDNSGSGSLYGITQGILYAADIDADVINMSLGGGGYNQSMDEAVQTAVAQGTIVVAATGNDGASSISYPAAYSSVIAVGSVTSNRTRSSFSNYGSGLEVMAPGSNIYSTYPNSRYTYLSGTSMATPHVAGVAGLIRAANPDISVAQARQILRDTAQEAGSFTQYGYGIVDAHAAVVAASGGSGG

SEQ ID NO: 2231 - DNA, 1239 bp, synthetic construct
  misc_feature 1..1239: note = Variant of serine peptidase from Bacillus sinesaloumensis
  source 1..1239: mol_type = other DNA
atggcagatcaagctagtcaagctaatggaaaccaggacgtcattgaaggcgagctgatcgtttcagtggaaccgaagaacggtaaacctgatgtgagcattcaaagtgcacaatccgtaacagggcaggaagacgtccttaaatcgaaaggctttacgatcgttgataccttgcatgtagaggatagcagcgtcaagccactcgtctcgaagaatttcaataagaaagtggtggagaagatgggactggtgtatcttgttcaatactctccggaccagtttaaaagttccaacattgcgaagaaagaactcagaaaagaattgatggatctgggctttaaagtccgctatataagcgaaaattacaagatgatggcgatcgaaggtacagccactcttcaggcagtacaccctaaccaaaactggcattataatatgattaaagctccggaagcgtgggctattacgtctggatcctctagcgttaaagtagcagtcctggatacagggatcgaccataatcacccatccttggccaacttcgtgaatactaatcttggccggtcgtttgttggaggaaacaccatggatgttcaaggtcatggcacacatgttgctggcacgattgcatcttatgggagtgtaagcggagtgatgcagagtgcgacactgatcccggtcaaagtgctcgataattctggcagcgggtccctttacggtattacgcaaggcatattgtatgccgccgacatcgatgcggacgtcattaacatgtctctgggtggaggaggctataatcagagcatggatgaggctgttcaaacagcagttgctcagggaaccattgtagtagcagcgactggcaatgatggtgcatcgtcgatcagttatcctgctgcctacagcagcgtcattgcggtgggatctgtgacgtccaatcgtacacgatcctcgttttctaactatggatctgggcttgaagttatggcaccgggcagcaacatctacagtacgtatcctaattccagatatacaaagttgagtggtacaagcatggctactccgcacgttgcgggcgtagctgggctcattcgcgcagccaacccagacatatctgtcgcgcaagcccgtcagattctgcgggataccgcgcaagaagcaggatcgttcacacagtacggctatggaatcgtcgatgctcatgccgccgttgttgctgcatccggtggtagcggcggc

SEQ ID NO: 2232 - protein, 413 aa, synthetic construct
  REGION 1..413: note = Variant of serine peptidase from Bacillus sinesaloumensis
MADQASQANGNQDVIEGELIVSVEPKNGKPDVSIQSAQSVTGQEDVLKSKGFTIVDTLHVEDSSVKPLVSKNFNKKVVEKMGLVYLVQYSPDQFKSSNIAKKELRKELMDLGFKVRYISENYKMMAIEGTATLQAVHPNQNWHYNMIKAPEAWAITSGSSSVKVAVLDTGIDHNHPSLANFVNTNLGRSFVGGNTMDVQGHGTHVAGTIASYGSVSGVMQSATLIPVKVLDNSGSGSLYGITQGILYAADIDADVINMSLGGGGYNQSMDEAVQTAVAQGTIVVAATGNDGASSISYPAAYSSVIAVGSVTSNRTRSSFSNYGSGLEVMAPGSNIYSTYPNSRYTKLSGTSMATPHVAGVAGLIRAANPDISVAQARQILRDTAQEAGSFTQYGYGIVDAHAAVVAASGGSGG

SEQ ID NO: 2233 - DNA, 1203 bp, synthetic construct
  misc_feature 1..1203: note = Variant of serine peptidase from Bacillus sinesaloumensis
  source 1..1203: mol_type = other DNA
atggcagatcaagctagtcaagctaatggaaaccaggacgtcattgaaggcgagctgatcgtttcagtggaaccgaagaacggtaaacctgatgtgagcattcaaagtgcacaatccgtaacagggcaggaagacgtccttaaatcgaaaggctttacgatcgttgataccttgcatgtagaggatagcagcgtcaagccactcgtctcgaagaatttcaataagaaagtggtggagaagatgggactggtgtatcttgttcaatactctccggaccagtttaaaagttccaacattgcgaagaaagaactcagaaaagaattgatggatctgggctttaaagtccgctatataagcgaaaattacaagatgatggcgatcgaaggtacagccactcttcaggcagtacaccctaaccaaaactggcattataatatgattaaagctccggaagcgtgggctattacgtctggatcctctagcgttaaagtagcagtcctggatacagggatcgaccataatcacccatccttggccaacttcgtgaatactaatcttggccggtcgtttgttggaggaaacaccatggatgttcaaggtcatggcacacatgttgctggcacgattgcatcttatgggagtgtaagcggagtgatgcagagtgcgacactgatcccggtcaaagtgctcgataattctggcagcgggtccctttacggtattacgcaaggcatattgtatgccgccgacatcgatgcggacgtcattaacatgtctctgggtggaggaggctataatcagagcatggatgaggctgttcaaacagcagttgctcagggaaccattgtagtagcagcgactggcaatgatggtgcatcgtcgatcagttatcctgctgcctacagcagcgtcattgcggtgggatctgtgacgtccaatcgtacacgatcctcgttttctaactatggatctgggcttgaagttatggcaccgggcagcaacatctacagtacgtatcctaattccagatatacatctttgagtggtacaagcatggctactccgcacgttgcgggcgtagctgggctcattcgcgcagccaacccagacatatctgtcgcgcaagcccgtcagattctgcgggataccgcgcaagaagcaggatcgttcacacagtacggctatggaatcgtcgatgctcat

SEQ ID NO: 2234 - protein, 401 aa, synthetic construct
  REGION 1..401: note = Variant of serine peptidase from Bacillus sinesaloumensis
MADQASQANGNQDVIEGELIVSVEPKNGKPDVSIQSAQSVTGQEDVLKSKGFTIVDTLHVEDSSVKPLVSKNFNKKVVEKMGLVYLVQYSPDQFKSSNIAKKELRKELMDLGFKVRYISENYKMMAIEGTATLQAVHPNQNWHYNMIKAPEAWAITSGSSSVKVAVLDTGIDHNHPSLANFVNTNLGRSFVGGNTMDVQGHGTHVAGTIASYGSVSGVMQSATLIPVKVLDNSGSGSLYGITQGILYAADIDADVINMSLGGGGYNQSMDEAVQTAVAQGTIVVAATGNDGASSISYPAAYSSVIAVGSVTSNRTRSSFSNYGSGLEVMAPGSNIYSTYPNSRYTSLSGTSMATPHVAGVAGLIRAANPDISVAQARQILRDTAQEAGSFTQYGYGIVDAH

SEQ ID NO: 2235 - DNA, 1224 bp, synthetic construct
  misc_feature 1..1224: note = Variant of serine peptidase from Bacillus sinesaloumensis
  source 1..1224: mol_type = other DNA
atggcagatcaagctagtcaagctaatggaaaccaggacgtcattgaaggcgagctgatcgtttcagtggaaccgaagaacggtaaacctgatgtgagcattcaaagtgcacaatccgtaacagggcaggaagacgtccttaaatcgaaaggctttacgatcgttgataccttgcatgtagaggatagcagcgtcaagccactcgtctcgaagaatttcaataagaaagtggtggagaagatgggactggtgtatcttgttcaatactctccggaccagtttaaaagttccaacattgcgaagaaagaactcagaaaagaattgatggatctgggctttaaagtccgctatataagcgaaaattacaagatgatggcgatcgaaggtacagccactcttcaggcagtacaccctaaccaaaactggcattataatatgattaaagctccggaagcgtgggctattacgtctggatcctctagcgttaaagtagcagtcctggatacagggatcgaccataatcacccatccttggccaacttcgtgaatactaatcttggccggtcgtttgttggaggaaacaccatggatgttcaaggtcatggcacacatgttgctggcacgattgcatcttatgggagtgtaagcggagtgatgcagagtgcgacactgatcccggtcaaagtgctcgataattctggcagcgggtccctttacggtattacgcaaggcatattgtatgccgccgacatcgatgcggacgtcattaacatgtctctgggtggaggaggctataatcagagcatggatgaggctgttcaaacagcagttgctcagggaaccattgtagtagcagcgactggcaatgatggtgcatcgtcgatcagttatcctgctgcctacagcagcgtcattgcggtgggatctgtgacgtccaatcgtacacgatcctcgttttctaactatggatctgggcttgaagttatggcaccgggcagcaacatctacagtacgtatcctaattccagatatacatctttgagtggtacaagcatggctactccgcacgttgcgggcgtagctgggctcattcgcgcagccaacccagacatatctgtcgcgcaagcccgtcagattctgcgggataccgcgcaagaagcaggatcgttcacacagtacggctatggaatcgtcgatgctcatgccgccgttgttgctgcatcc

SEQ ID NO: 2236 - protein, 408 aa, synthetic construct
  REGION 1..408: note = Variant of serine peptidase from Bacillus sinesaloumensis
MADQASQANGNQDVIEGELIVSVEPKNGKPDVSIQSAQSVTGQEDVLKSKGFTIVDTLHVEDSSVKPLVSKNFNKKVVEKMGLVYLVQYSPDQFKSSNIAKKELRKELMDLGFKVRYISENYKMMAIEGTATLQAVHPNQNWHYNMIKAPEAWAITSGSSSVKVAVLDTGIDHNHPSLANFVNTNLGRSFVGGNTMDVQGHGTHVAGTIASYGSVSGVMQSATLIPVKVLDNSGSGSLYGITQGILYAADIDADVINMSLGGGGYNQSMDEAVQTAVAQGTIVVAATGNDGASSISYPAAYSSVIAVGSVTSNRTRSSFSNYGSGLEVMAPGSNIYSTYPNSRYTSLSGTSMATPHVAGVAGLIRAANPDISVAQARQILRDTAQEAGSFTQYGYGIVDAHAAVVAAS

SEQ ID NO: 2237 - DNA, 1230 bp, synthetic construct
  misc_feature 1..1230: note = Variant of serine peptidase from Bacillus sinesaloumensis
  source 1..1230: mol_type = other DNA
atggcagatcaagctagtcaagctaatggaaaccaggacgtcattgaaggcgagctgatcgtttcagtggaaccgaagaacggtaaacctgatgtgagcattcaaagtgcacaatccgtaacagggcaggaagacgtccttaaatcgaaaggctttacgatcgttgataccttgcatgtagaggatagcagcgtcaagccactcgtctcgaagaatttcaataagaaagtggtggagaagatgggactggtgtatcttgttcaatactctccggaccagtttaaaagttccaacattgcgaagaaagaactcagaaaagaattgatggatctgggctttaaagtccgctatataagcgaaaattacaagatgatggcgatcgaaggtacagccactcttcaggcagtacaccctaaccaaaactggcattataatatgattaaagctccggaagcgtgggctattacgtctggatcctctagcgttaaagtagcagtcctggatacagggatcgaccataatcacccatccttggccaacttcgtgaatactaatcttggccggtcgtttgttggaggaaacaccatggatgttcaaggtcatggcacacatgttgctggcacgattgcatcttatgggagtgtaagcggagtgatgcagagtgcgacactgatcccggtcaaagtgctcgataattctggcagcgggtccctttacggtattacgcaaggcatattgtatgccgccgacatcgatgcggacgtcattaacatgtctctgggtggaggaggctataatcagagcatggatgaggctgttcaaacagcagttgctcagggaaccattgtagtagcagcgactggcaatgatggtgcatcgtcgatcagttatcctgctgcctacagcagcgtcattgcggtgggatctgtgacgtccaatcgtacacgatcctcgttttctaactatggatctgggcttgaagttatggcaccgggcagcaacatctacagtacgtatcctaattccagatatacatctttgagtggtacaagcatggctactccgcacgttgcgggcgtagctgggctcattcgcgcagccaacccagacatatctgtcgcgcaagcccgtcagattctgcgggataccgcgcaagaagcaggatcgttcacacagtacggctatggaatcgtcgatgctcatgccgccgttgttgctgcatccggtggt

SEQ ID NO: 2238 - protein, 410 aa, synthetic construct
  REGION 1..410: note = Variant of serine peptidase from Bacillus sinesaloumensis
MADQASQANGNQDVIEGELIVSVEPKNGKPDVSIQSAQSVTGQEDVLKSKGFTIVDTLHVEDSSVKPLVSKNFNKKVVEKMGLVYLVQYSPDQFKSSNIAKKELRKELMDLGFKVRYISENYKMMAIEGTATLQAVHPNQNWHYNMIKAPEAWAITSGSSSVKVAVLDTGIDHNHPSLANFVNTNLGRSFVGGNTMDVQGHGTHVAGTIASYGSVSGVMQSATLIPVKVLDNSGSGSLYGITQGILYAADIDADVINMSLGGGGYNQSMDEAVQTAVAQGTIVVAATGNDGASSISYPAAYSSVIAVGSVTSNRTRSSFSNYGSGLEVMAPGSNIYSTYPNSRYTSLSGTSMATPHVAGVAGLIRAANPDISVAQARQILRDTAQEAGSFTQYGYGIVDAHAAVVAASGG

SEQ ID NO: 2239 - DNA, 1233 bp, synthetic construct
  misc_feature 1..1233: note = Variant of serine peptidase from Bacillus sinesaloumensis
  source 1..1233: mol_type = other DNA
atggcagatcaagctagtcaagctaatggaaaccaggacgtcattgaaggcgagctgatcgtttcagtggaaccgaagaacggtaaacctgatgtgagcattcaaagtgcacaatccgtaacagggcaggaagacgtccttaaatcgaaaggctttacgatcgttgataccttgcatgtagaggatagcagcgtcaagccactcgtctcgaagaatttcaataagaaagtggtggagaagatgggactggtgtatcttgttcaatactctccggaccagtttaaaagttccaacattgcgaagaaagaactcagaaaagaattgatggatctgggctttaaagtccgctatataagcgaaaattacaagatgatggcgatcgaaggtacagccactcttcaggcagtacaccctaaccaaaactggcattataatatgattaaagctccggaagcgtgggctattacgtctggatcctctagcgttaaagtagcagtcctggatacagggatcgaccataatcacccatccttggccaacttcgtgaatactaatcttggccggtcgtttgttggaggaaacaccatggatgttcaaggtcatggcacacatgttgctggcacgattgcatcttatgggagtgtaagcggagtgatgcagagtgcgacactgatcccggtcaaagtgctcgataattctggcagcgggtccctttacggtattacgcaaggcatattgtatgccgccgacatcgatgcggacgtcattaacatgtctctgggtggaggaggctataatcagagcatggatgaggctgttcaaacagcagttgctcagggaaccattgtagtagcagcgactggcaatgatggtgcatcgtcgatcagttatcctgctgcctacagcagcgtcattgcggtgggatctgtgacgtccaatcgtacacgatcctcgttttctaactatggatctgggcttgaagttatggcaccgggcagcaacatctacagtacgtatcctaattccagatatacatctttgagtggtacaagcatggctactccgcacgttgcgggcgtagctgggctcattcgcgcagccaacccagacatatctgtcgcgcaagcccgtcagattctgcgggataccgcgcaagaagcaggatcgttcacacagtacggctatggaatcgtcgatgctcatgccgccgttgttgctgcatccggtggtagc

SEQ ID NO: 2240 - protein, 411 aa, synthetic construct
  REGION 1..411: note = Variant of serine peptidase from Bacillus sinesaloumensis
MADQASQANGNQDVIEGELIVSVEPKNGKPDVSIQSAQSVTGQEDVLKSKGFTIVDTLHVEDSSVKPLVSKNFNKKVVEKMGLVYLVQYSPDQFKSSNIAKKELRKELMDLGFKVRYISENYKMMAIEGTATLQAVHPNQNWHYNMIKAPEAWAITSGSSSVKVAVLDTGIDHNHPSLANFVNTNLGRSFVGGNTMDVQGHGTHVAGTIASYGSVSGVMQSATLIPVKVLDNSGSGSLYGITQGILYAADIDADVINMSLGGGGYNQSMDEAVQTAVAQGTIVVAATGNDGASSISYPAAYSSVIAVGSVTSNRTRSSFSNYGSGLEVMAPGSNIYSTYPNSRYTSLSGTSMATPHVAGVAGLIRAANPDISVAQARQILRDTAQEAGSFTQYGYGIVDAHAAVVAASGGS

SEQ ID NO: 2241 - DNA, 1236 bp, synthetic construct
  misc_feature 1..1236: note = Variant of serine peptidase from Bacillus sinesaloumensis
  source 1..1236: mol_type = other DNA
atggcagatcaagctagtcaagctaatggaaaccaggacgtcattgaaggcgagctgatcgtttcagtggaaccgaagaacggtaaacctgatgtgagcattcaaagtgcacaatccgtaacagggcaggaagacgtccttaaatcgaaaggctttacgatcgttgataccttgcatgtagaggatagcagcgtcaagccactcgtctcgaagaatttcaataagaaagtggtggagaagatgggactggtgtatcttgttcaatactctccggaccagtttaaaagttccaacattgcgaagaaagaactcagaaaagaattgatggatctgggctttaaagtccgctatataagcgaaaattacaagatgatggcgatcgaaggtacagccactcttcaggcagtacaccctaaccaaaactggcattataatatgattaaagctccggaagcgtgggctattacgtctggatcctctagcgttaaagtagcagtcctggatacagggatcgaccataatcacccatccttggccaacttcgtgaatactaatcttggccggtcgtttgttggaggaaacaccatggatgttcaaggtcatggcacacatgttgctggcacgattgcatcttatgggagtgtaagcggagtgatgcagagtgcgacactgatcccggtcaaagtgctcgataattctggcagcgggtccctttacggtattacgcaaggcatattgtatgccgccgacatcgatgcggacgtcattaacatgtctctgggtggaggaggctataatcagagcatggatgaggctgttcaaacagcagttgctcagggaaccattgtagtagcagcgactggcaatgatggtgcatcgtcgatcagttatcctgctgcctacagcagcgtcattgcggtgggatctgtgacgtccaatcgtacacgatcctcgttttctaactatggatctgggcttgaagttatggcaccgggcagcaacatctacagtacgtatcctaattccagatatacatctttgagtggtacaagcatggctactccgcacgttgcgggcgtagctgggctcattcgcgcagccaacccagacatatctgtcgcgcaagcccgtcagattctgcgggataccgcgcaagaagcaggatcgttcacacagtacggctatggaatcgtcgatgctcatgccgccgttgttgctgcatccggtggtagcggc

SEQ ID NO: 2242 - protein, 412 aa, synthetic construct
  REGION 1..412: note = Variant of serine peptidase from Bacillus sinesaloumensis
MADQASQANGNQDVIEGELIVSVEPKNGKPDVSIQSAQSVTGQEDVLKSKGFTIVDTLHVEDSSVKPLVSKNFNKKVVEKMGLVYLVQYSPDQFKSSNIAKKELRKELMDLGFKVRYISENYKMMAIEGTATLQAVHPNQNWHYNMIKAPEAWAITSGSSSVKVAVLDTGIDHNHPSLANFVNTNLGRSFVGGNTMDVQGHGTHVAGTIASYGSVSGVMQSATLIPVKVLDNSGSGSLYGITQGILYAADIDADVINMSLGGGGYNQSMDEAVQTAVAQGTIVVAATGNDGASSISYPAAYSSVIAVGSVTSNRTRSSFSNYGSGLEVMAPGSNIYSTYPNSRYTSLSGTSMATPHVAGVAGLIRAANPDISVAQARQILRDTAQEAGSFTQYGYGIVDAHAAVVAASGGSG
